United States Patent Application Publication US 2022/0056532 A1 - sequence listing, part 2

SEQ ID NO: 1783 - DNA, 4494 bp, Firmicutes bacterium CAG:270
atgatgaataaagagataacaaaaccaaacgaacagaatatactagttggaatcgacgttgggtctacgacaacgaaaatagtagcgcttgatgctgatcatgatcatcagctgttattttctgattatgcaagacatcatgcaaatcagattgctagtgtgatcaaaagtattaaagagttttgcagtcatataaaacaaaaaaagatcagattgtgtctgacaggttctggagcaaaaccagtttcttctattttaaaagtaccatttgtacaggaagttgctgcgaatgcgattgctttgcaggataaatttcagaaagtaggaacggcaatcgaattaggtggacaggatgcgaagatgatcttttttaaagattctgaaaatggacagccacagagtgttgcagatatgcgaatgaatggaagctgtgcaggtggaacgggagcatttattgatgagattgcatctgtattaaaagttccagtggaacattttaatgaattagcgcaaaaaggaacacatctttatgatatttcaggaagatgtggtgtttacgcaaaaacagatattcagccactgttaaatcagggtgcagccaaggaagatcttgcattgtcagcatttcatgcaatcgcaaagcagacgatgggaggacttgcacaaggtctggagatcaaaaaacctgtggcatttgaaggtggaccattaactttccatccgacattggtaaaagtgtttgcagaacgtctggaacttaagaaagaggaaatcctttgtccagagcattcagaattaatgatcgcatatggagcagcgctgtctttggagaagatgttctcagacagtaaggcaaaagatgttgataaacttttagaaactttagaaagtgcacagagaaataatgcacacatatcaggagaagctgcggtaccgttttttgcgtccaaagaagaaaaagaaaaatttaaaaaagcacatcagaagaaaaaggtaacatggaagcggcctaaaaaaggtgaaacagtaagatgtttccttggaattgatgctggaagtacaacaaccaagtttgtattgcttgatgaacaggaagaaattcttgattctttttatgcaccgaatgaaggagatccactaaaagttgctaaagatgcactgatttgtttaagaaaacgatatgaagatgtaggagcgaaacttgagatcctttccgctggaacaacaggatatggggaaatgctgttttccaaagcgtttgaaattccatgccacacagtagaaacagttgcccatacaagagcttctgagaaatatgtaaaagatgcctcttttattctggatattggcggacaggatatgaaggcaatctggctggaagatggagttattacaaatatcctgctaaatgaagcatgttcttccggatgtggatccttccttgaaaactttgcttcatctttacatattcaaacaaaagaaatcgcagacaaagcatttgcatcaaaaaatccagctgttttaggaagccgttgtacggtatttatgaatagtagtatcattacggaacagagaaacggaaagaatccagaagatatcatggctggattatgtcgatctatcattcaaaatgtatttacaaaggtaatccgtgtatcaaatcttgattctttaggaaagaagattgttgtacagggtggaacttttgaaaatgatgcagtcttacgtgcaatggaagaatatgtaggacgtgaagtggtaagagcaccataccctggaatcatgggagctattggtgtaggactgattgctaaggaacagtatgaaaaagatccggaaagtgtgaaagcatgggatcttacaaatcttgatacattttcatatacacaggaggcaaatgcaccttgtccgttctgtactaaccattgccagagaacgatcgtacagttctcaaatggaaattcatgggtaacaaacaatcgttgtgaaaaaggtgagatcatcggtgatccaaagaatacggaagtatctaaaaaactaaaagaaaccattaagaaaaataaaagtgttccagatttatttgaagaacgtaagcaattattatttaaagaatatccatacccaacgccaaagaaggagaggaatattacgattggaattccaagagtgctttcctattgggatacgatgccattttggactacatttttcaaaactttgggatacaatgtgcagttatccgatgaaagtacaagagagatttatgaaagtggattatcagcagtaacttcagataccgtatgtttcccagctaagttagttcatggccatcttagaaatctagtgaaaaaatatcatgtagacagaatctttatgccatcgatcacaacagtaccaccagagaatacagaaaaaacaagtgaatctatgtgtgctgttgtgaaaggatatccaattgttatcagaaactccgataatccacaggataaatggaatgttccatttgatgcaccattatttcactggcatacgaagaaagacagacagcgtcagctgcttgcatatatgcaggatgaatatcatatttcaaaagaagaagtgcttgaagcaatgagggcaggagatcttgcacagaaatcttttgaggaacagctaaagaaacgtggacagaaaatcttagatgatgtagaagaaaaagacagctttgcagttgttttggcttcacgtccataccagaatgatacattggtaaaccatgatctttctaaaatgtttataaaggcaggaattgcagtattaactgcagattcactgccagaagtgaacaaaacacaactgtctaaaagccgcattgatatagtaaataactatcatgcaagaatgctgtcatctgcgatccttgcagcacaaagtgaacatcttgagtatgtacagcttgtaagttttggttgcggacatgacgcttatttatccgatgagatcacaagaatgatgaaagagatttctggcaagacaccactgatattgaaagtagatgaaagtgataatcagggaccactaggaattcgtgtccgttcgtttttggaaactgtcaagatgggaagagagaaacaaaagaaacttaatgtacatgaattacaggagccatatgcagtcaaatttacaaaacaggataaaaaagaaaagattgcattagtaccaaatacatctcatgcattttgccgaattatgacggctgcattaaaaggccagggaattcgagcagtatcattggatatcgggcgagaggatgcaatccgcctgggaaaacgatatgtacataatgatatttgtttcccggcacaggttgtaatcggggaagcattagcagcacttgaaagtggaaagtataatggaaaagatgttgcagttgtcatggcaaaatatgtgggtgactgccgtttgacacattacggagcattacttagaaaagcattggatgatgcaggatatgaaaatgttccgattctcacaaatgacgatgtggattctcataacatgcatccaggatttaagttaaatcttgcatcctctgtaaaaattgcatttgcgctgccgatgatcgatgtgctggaagaattactgcgaaagattcgtccttatgagacggtcaaaggaagtgcagataaagcatttgataaagcgttagactgtgtgatcgagggacttgagaaatctggtgtccgtggggcaagaaaaagatttaaagaagcaatcaatattatgaagaatatatcttatgacagatcaaacctgaaaccgcagattctgatcgtgggagaatatcttttgaattttcatccaggtgccaatcatgacattgaaaggtatctggaagataatggatttgagattattgaagcaagaatgacggatgtaatcagaaaaacatatttttatcaggatgctcagataaaagaatatcacttaaataaaccaatcgatcagaaaatatggtttaggacagcggatactttctttgatcttgcacatagtctgacagattcgattgcaaagaatcatccattgtataagccggcaattcgcatggatgaactggtaaaagcaagtgatccggtgattcatcatacatttgatgcgggagaaggcgttttgattccaggagagatcattcatcatgcagaacatggatgtagatatttcttgatcttacaaccgtttggatgtcttccaaatcacgttgttggaagaggaatttcaaaaaaattaaaagaaatgtatccaaatgcacagattcttccactggattatgatccggatgtaagttttgcgaatattgaaaacaggcttcagatgctagttatgaatgcaaaacaggaaattcttgaagaaaatgaagaacgtgatcatagaagaagccatcattatacacagacagaagataaaaattatcgaggaaagagttataatgttggaaaaacttctggtgtataa

SEQ ID NO: 1784 - DNA, 891 bp, Firmicutes bacterium CAG:270
atgttcattggatatttaagttacaaaaaagaatggatcacaaaccacacagaatcacaattatcaggactggtacttaatatatttaatccagctctgatcatttcaggggtcgttggatcttctgaaaatgggaattggacaatggtgcttataaatctgcttcttgcagttatcttatttgcaatattgatcttcattagtccattgtttgtgagaattctaagaataccaaagaatgaaagaaatatttattccgtgatgctgatcttttcaaatcttggatttatgggaatcccgatcatagaagaattatatggaaaaggtgcgatcatttatgttgtactgtattcctttgtttacagcattattttctattcatatggaatttatctgtttgagaaagagaaggcattgcagacaggggaaaaagcaaagatcaagtttgaatggaaaaagatgatcaatccagggattgcagcgagcttgattgcaatggttattttcctatttcagatcaaggtgccggcaccagcagtaagtttcgtggattatcttggaaattcatgtattccattgtctatgatcctgacaggagtatcggtagcaaaacttccattgatagaagttttcaaggataagaaaatgtatttctttacatttctaaagatgttggtgattccaatcattgcagcagttttgatcagaaactttcatcttgatccagtactttcaggaatcatggtattaatgtttggaatgccgaatggaagtatggcggtaatgatgtcgatcgattatggtttagacagttcaatctgtagtcgaggaatcgtactgacaacactgttatcaatcataacgctgccgatcgtggcatatttgatataa

SEQ ID NO: 1785 - DNA, 1260 bp, Firmicutes bacterium CAG:270
atggcgaagaagaaaaagaagaataagcttggtgcgaaagcgatatttgccagaattcttgtagtgatactggtgacagccatcggtggagttgcaagtttttttggatttaagacatattttgcaagtaaattcaaaaaagataagaaagctgagattgcaaagcagttaaaagaagaaagtaaagaaaaggtagacgttggaatgatccagacaggaaattccatcgtgatccgaatttatcataatagaaaccaagagatgatttttgttccattacgtcaggatatgacattaaaacttacaaagagcggtaagaaggcggtaaaggaaactcttggaacaaatgtaagcgaggcgacggttgcagatgttatcaaagcaacgaaggaagacggagctttgatgaaaaaacaggtggagaatacacttggaattacaattaattcttatgaattgttatcacgcaagaagtttgtaacattgataaataaggcgggggacattaaagtagaatttgatcaggcaatgtcttatactgattccacagacaaatatgttacattgaatgagggtgagaacagtctgaatggaacagctgtttattcactgatgagtgaaactgatatttttgaagacaagaaccagcaggcagaacttacaggtgagatttgtgtagctgttgctgctgcattgaacgataaatcgttatctgaatataaagaatatgcacaggaatattttgatgcagttgattctgatgggtcttatgaaaatgtagaaagctatcttaagagaattcgccagattaaagataagaatctaaacttcaaagtgttagatggaacagaaagtaatggaaagttcaaactggatacagatgaagccaagagagtttttgatgagatgttatctgaagatggagatttaagttctgcattaagttcaagtacaacagaagcaaagaaaacaacagaaagttcgtcatcatccaagaatatttctattgagatccaaaattcaacatcaatttccggattagctggaagatggaaagataaactgtcaagtgatggatatacagtgggttctgttaaaacatacagagagggatcactgacacatacgaagatcattgttgaagacaagtctttaggacaggatttaaagagttattttaagaatccagaatatacagttggaacagtaagcagcggtgcaagaatctgtattattgttggaacggaagatgaaatttag

SEQ ID NO: 1786 - DNA, 1029 bp, Firmicutes bacterium CAG:270
atgagtgataagattaagattctggcaatcgaatcttcctgcgatgagacagcagcagcagttgttgagaatggaagatgtgtaagatccaatattatttcatctcagattgaattgcacaaattatatggaggagttgtcccagagattgcctcaagaaaacatgtggagaaagtgaactttgtagtaagagaagccttaaaagaagcaggagagacattagacagtattgatgcgatcgcggtcacatatggaccgggtcttgttggtgcacttttggtaggggtagcagaagcaaaagcattagcatttgctaaaaataagccattagtaggggtacatcatatcgaggggcatatttgcgctaactatatagaacatccagatttagagccaccatttttatgtttagttgtatcaggaggacatacacatcttgtagatgtcaaagattatggcaaatatgagataattggatgcacaagagatgatgctgcaggggaagcatttgataaagtagcacgagctattggcctgggatatccaggaggaccaaagattgaagctttggcaagagaaggaaataaagatgcaattgcatttcctagagctaaggtaagtgattctaaaatggattttagttttagtggattaaaatcatctgtattgaattatttgaataaatgtgaaatgaaaggcgaggaagtaaaccgtgcagatgtagcagcatcttttcaggaggctgttgtagatgtgttaagttctcatggagttgaagcggcaaaagaacttgggtataagaaacttgcgattgcgggtggagttgcgtctaacggtgcatttcgtgccaaaatgatcgaacgttgtaaagcggctggaattgaattttattatccatcaccaatcttttgtacagacaatgcagcgatgatcggtgtatgtggatattatgattatatgaatggtgtgagaagtggtttggatttaaatgcggtgccaggattaaagatcggtaccagacaggggtaa

SEQ ID NO: 1787 - DNA, 708 bp, Firmicutes bacterium CAG:270
atgaaagattatgttgcatttgatcttgagaccactggtttgtcattggagagagatcagatcattgaaataggggctgttaaggtcagagatgggaagatcagtggaaaatataactgtatcattcatccagagatcgaggtcagtgattttattatcaatttaacaggaatcgacaggaatatgctgaagaaaggaatttcactgaaagaaggtgttgagggatttttggaatttagcaggaattttccggttcttggtcataatgtaatgtttgattacaaatttatgaagaaggcagcagcttcatttaagcataactttgagagagagggagttgacacgctgaaagtggccagaaaactgttaggtgagcttgagaacaagaaactggaaacactgtgtgcacattaccattatgtgaatcaggcagcacacagggcttatgatgatgcactggcaacggcagttgtatttgagcagatgaagaaagaatttccagaagagaaagatatatttatgtcaagacagcttcaatacaaggtcaagaaagaacgacctgccacagcaaaacaaaagaaatatttagcgcagttgatagcatatcatgcgataagggagaagattgatgttgatcagatgacacaaagagaagcatcaaagaagattgatcatattatatttaattatggagtgatgaagaaatga

SEQ ID NO: 1788 - DNA, 798 bp, Firmicutes bacterium CAG:270
atgttaaagattaaggagtatgtcaaagcagaaagtcttgaacaggcatatgagctgaaccagaagaagacgaactgtgtgattggcggtatgttgtggcttaaaatggtcacaagaaatgtacaaaaagcaattgatctatcgggacttgggcttgatcagattgaagaagatgatgagaaattttccataggagcaatggtcacattaagacagatcgaacttcatgaaggattaaatacatggagtcatggagctgtcaaagaaagtgtaacacatatcgttggcgtacagtttcgtaatctggctacggttggcggaagtattttcggaaagtttggtttttcagatgtattaagctgcttccttgcatttgacagttatgtggaattacatcacgaaggaattattccactggagcagtttgcagtgaataaatatccagatgatattctggtgcgtctgatcgtcaagaaacatccacaggaaagtgtttatctttctcatagaaattcgaagacagattttccggttttaacatgtgccatttcattaggaaaggaagaggcttatgcagttgttggagcaagaccatcaagagcggtaaaagtaaaattatcagatcaatggaatgttatgatcaaagacgatgaaggaagaagaaagattgcagatgaagtcacaggacagcttaattttggaagtaacatgcgaggaagtgcggattatagaagacatttatcagaagtccttataagaaggggattggcacagttagaagaaaggagggaaaattag

SEQ ID NO: 1789 - DNA, 1458 bp, Firmicutes bacterium CAG:270
atgaaaaagaaacagacgcagattaggcaatatgctaagatcatgagtgtatttctggtagcagttgttataggacttctgattttcttctattgtatacaacgttccgttgaacacagatcacaaaaaatgatgatgaacaatgtatcaagacaaagcgtgcatttacgcacgatattgaacattcaatatgcttatcttaatggattcgcagaagaaataggaaaatcagatcagctattagatcaaaaaaatatcaatttgctccagtctgtgacaaagaatacagattttggagcgactgctctgatcgagccagatggtacttcacattatagtaacgggcagacaaagaatgtatcgcatcgaagatattatagagaagcgatgagtggaaaaaggaccttaagtgagccattagacagtagtatctcaggatcgacaagagttgtattaggagtaccaatctataaggataagaaagtaatcggaatccttggaggctcttatgatgtcacagcattaagccgtatgctttttgaagatttatttgacggggaaggttgtagcatgatcattgcccaaagtggggaagtcattgcatttgaaggagatacgtcctattggaacattgattatcgggataacttttatacatattgcaagaaattgatgatcaaagataatgtgacagccaagatgatcaagcaggatttttacaaaggaaaatcaaatctggtaaccgcagatagtaagaagaagggaaacgtaagacattattttgcttatatgccaatgaagattaataactggatgctttgttatgcggtaccagaaaaaactgcacagcaatcctatgactttattgaacattatgagatcatttttatggcagtatttgttattttagttattttgctggtgctatatatcgtgcatgaaaactatagaagggatcaggaattaatgaaatatgcacagacagatgcgctgacaggtttatataataaagaaacaacgaaacttcgaaccgatgagatattgtcaacagataaagatatgatccatgcatttttaatcttggatatggattgcttcaagcagatcaatgatggatatggacatgcggtgggagacattgttttacagaagtttggacaattattgcgtgatatctttagagaagatgatattgtagggcgaatcggtggagacgaatttgtcgttgtaatgaagaatattaagatgaaagaaatggcgattgccaaagcagaggaactacttacaaagacgcagcaatatgaaatcaaagaattaaatggctcagcaatctctatcagtataggaattgcaatggcgccagaagatggagactgctatatggatctttacaaacgggcggatcaagccttgtatcaggcaaaacgaagtggaaaagcaagagtttgtggttattaa

SEQ ID NO: 1790 - DNA, 2484 bp, Firmicutes bacterium CAG:270
atgacacagagaaatagtgaaacaaaattacaaaaatttcacagcatcatgcaaaaagtcttaaaatatgggattgtccttgcattgatcgcatttattgtattggttttaacaaataaaaatcagttttcagaaagagttgcaaaaggtgttccagaaaagaaaatatcaaagattgcaatttcagatggtgataaagttgtacaaaagtttaaagcaacatgtgatacgatggaacgtttgaatattctggttgacagaaatgaacaggttggaagagctggaagtattgatctgaatgtaaaagatagtaagggaagatcaatctatcatattatgccgagcctgttagaggttgatggattaaagaatatgacggcaacaatgagacgtacccaaagagctgaatatcgctggtacagagttgtagtaaaccagaaactgaacaaaggtgagaattatacgattgagatcacagcaaaaggaatcaagaaagatcgtccattatatttatatacatcaaagaaaatgggaaatatttttagtcctgtgaaagtcaatggacagaagatggatgtacatatccgtacaagagtatggacaacacagattgatgtttcagcaattgttttaacagttgcaattacattggcactgatcgcattgattcttattccaatatatttgccgaaaaaatggaataagagatttacatggatattgtttgttataacaccttggatttcgttttacatggttgagaaggtattctataatccgatcagtgttatgaataagctggcattcgggctgaatgtattatggtattatattatttatatgatcttgttgcttatatttaacagagtgaaatgggcattgttggttggaaatgtatttttctatgcagcagcgataggtaactattttgtacttgcattccgtggaactccaatcacaccagcagatatttatgcccttggaactgcaatggacgtagcagatcattatgtattatcctacgataaagcagcaatcgtagcaacagttgtattacttggaatgtgtgtgtttgcatccaaacttgaaacatatccaatctttcaatggagaaaacgattgattgctgttttagttacggttcttgttacagcagcaagtgcttttacactgacaagagttgatgcactacaatctaagggagttaaggtgaatttttggaatcagaaattaggttataccaataatggatatattttaagtttcttaatgaatattcagtatacgatcgtatcccagccagaagggtatagtgcaaataaagtaaataagattgcagacaactacgaagttacacagggaagtaacaaaaacttaaaacaaaaaccaaatgtagtcgtgatcatgaatgagacgttttctgatctgaatgtggttaataagatcaagacaaataaagaggttatgccatttattaacaatctgaaagaaaataccatcaaaggtcatatgttagtgtctgtttttggtggaggtacaagtaattcggaatatgaatttttaacaggaaactctgtatcagcacttccattaaatggaaacgcttatacacagtttgtaaaacataaagtaccaagtcttgcatcccagttgaaacaacaggggtatgatacgttggcattccacccatacaaagcacatggatggaacagagatactgtttacccattgattggatttgatcagttcttagatgaaacatgcatgaatccaaatggagaaaaattccgaggatggtattctgattccgaggattacaataagatcattgatatctttaataagaaaaaggcagggcagccattattcttatttaatgtaacgattcagaaccatggaggatatctgatcgctgataagaactttaaagaagagatcaagatcaaggatgaaaaggcaacagatacagcaaatcgttatctgtcactgatccatgaatctgaccgtgcatttgagaagatcattaattactttaagaataagaaagaaccaacgatcgttgtaatgttcggggatcatcagccgaaactggaagattcattctatgaactgttatatggaaaatcattaagcaacttaagtttgaaagaacagcagaagaagtatacagtaccatttatcatatgggctaactatgatattgatgcaaaaagcgatgtagaaaatgtcagtgcaaactatttatcaagcttgatgcttcagcagacaaacttaaaattgtcaagatataatgaatttttattagatatgagaaaaaatgttcctgcattgaatgcaaatgggtatgtagacaaagatggagaaaatcatcatttttcagaacaaaataaatacacaaaactgatcacacagtatcagtatctgcagtataatagtttgatggataagaaacatgtcagtacagatttgttttctgtgaaataa

SEQ ID NO: 1791 - DNA, 921 bp, Firmicutes bacterium CAG:270
gtgtttaaaacagagggtatttatctctttgtgggttattggcatatcctaaaagagaaaataaaaagaggccggaaagcgcctcttcttcttaatgacgcctttgtcttagaattattatataagatatggtataatatttcaagaaaatcaatacgcaggaaggaaattagtatgaaatctgtggcaatggcctattataatggtgcaaaatatatagatgaacaaataagatcaattcttgccaatatggaagatacagatgaacttattatttcagtggatgatgccagcgatggatcagaaacgatactacaaaattgggcccaaaatgacccaagaatccgcataatcaaaggaccggggaagggtgttgtgaaaaactttgagaatgcatttagacattgtcgaggggatattattttcttatccgatcaggatgatgtctggaaaaaaaataaaatgataaaaattcagcaagcatttgaagaccctaaagtgatggcagttgttcacgatgctcagattgtagatgaaaaactttcatctttaaatgaaacaacatttgaatggagagacagcaaagcgggcttttggaagaacatgaaaaagaattcctatattggatgttgtatggcagtcagaagatctgcattaaagaggattctgccaattccagataatatctggattcatgatcagtggatcggattgcttgcagaacagctcgggaaagtggtatttatagaagaacctctgatttattatcgaagacatgggggaaatgttactgaattaacccatggttcgatcacatctatgatcaaaaaaagatatcatatgatcatggaaatcaaccgacgtgtaaaagaatggagtgaacatgacaaacaaaatcaaagacacattgaaaaaccataa

SEQ ID NO: 1792 - DNA, 1368 bp, Firmicutes bacterium CAG:270
atgaacaaacacaaaagaagcactttctccggaaagcttggctttgtcttatcggccgctggtgcttccgtaggacttggaaatatctggagatttccatatcttgctgcaaagtatggtggcggaatctttttacttatttatatcatactggcattaaccttcggttacactttgatcatggcggagacttctcttggacgtatgacaaggaaaagtcctgttggagcatttggaaactttggaaaatcccgttttatatcccttggcggatggatcaatgcgatcattccaatccttattgttccttattattctgtcattggcggatgggtcatcaaatacctgatcgagtatttttctggacatagcaaagctttagctggtgatacttatttcacaagttttatttccaatgggatttccaccgaaatctgctttttgatctttacattatttactcttggaattatttatgctggtgtccgcaatggaatcgaacgcgtttccaaattcatgatgccaatcctaatcgttttatcattgatcatcgcagtttattccgtaacaagacccggtgccatagaaggtgttaaatattttcttgtgccgaactttgagcatttttcatggatgacggtggtatctgccatgggacagatgttttattctttatcaatcgctatgggaattctgatcacgtttggttcttatatgaaaaaagacacttccattgagaaatcaacagaaaatgttgaaatttttgatactgccattgcgatcatggctggacttatgatcattcctgctgtttttgctttctctggaggtgatgcagcaactttaaaatctggtcctgcactgatgtttatcacaatcccgaaagttttcgcaaacatgggatttggaactgcgatcggtattgtatttttcttattagtactgttcgcagctgtgacaagttctattgcactgacagaaagtgctgtttcaacattcgaagatgaattgcactggagccgtagaaaatcgactgtttttatgggtgtgatcatgattcttcttggaactctttcctgtcttggatatggtccacttgcggattttaagattcttggaatgcagtttcttgatttctttgatttcatgacaaattctgtgatgatgccaatcgcagcgatcgcaacatgccttctggtatccaaagtcgttggagttgataaattagaaaaagagatcacaaaggatggacagccatttcgtcgtaagaagatcttctgctttatgatcaaatatctttgtccgttttttgcagcaatcattttgatcagttctgttgcaaatgcatttggtattattacaatgtaa

SEQ ID NO: 1793 - DNA, 933 bp, Firmicutes bacterium CAG:270
atgagtaagttatgtagttgtattgttccatgttttaatgaagaggaagtaattccgctttattatgaggagatgcagaaagtaaggaaacaagaagaagggaaaattgactttgagattatctttatcgatgatggaagtaaagataagacattagaagttataaagaaattaagcgaacaggatgaatgtattcattatgtatcattttccaggaacttcggaaaagaagctgcgatgtatgcaggatttgaacatgccaatggtgaatatgttgtgacaatggatgttgatcttcaagatccgccacatttaattccagagatgatccgatgcatcgaggaagaaggatatgatagtgtggcaacaagacgtgttacaagaaagggagaaccaccgatccgctcatttttcgcaagacgtttttatggattgatcaataagatctctgatgctgatatcgtagatggagccagagattttcgtatgatgaagagagatatggttaacgcaatcctttccatgccagaatataaccgatttacaaaaggtatctttggatgggtaggatttaaaacaaaatggattgaatttgagaatgtagaacgtgcagcaggagagacaaagtggtcattctggaaattattccgatatgcattagaaggaatcattgcattctccacagtgccgcttacgatcgtatcactgatcggagtgatcgtttgtatcatcgcatttttattcctgttgtttgttgtcataagagcaacaatatttggagatccggtcgcaggatggccgtcattgatctgtgttatcagtttcttaagtggaattcagttacttggaatcggagttgtaggaatgtatttgtctaagacatatttagagacaaagaaacgtccgatctacattaaaaaagaaagtaaataa

SEQ ID NO: 1794 - DNA, 867 bp, Firmicutes bacterium CAG:270
atgattatgagaaagatttttggcaagtttcttgcagcaggactttgtattgcgatggcattatcatcagtgacagtcaaagcagatagtgtggatcagaaatatctggcacttggagctgacttgacagcttcccagaagaagaaagtattagaacttctgaatctggatgacaatagtgattataaggttattacagtaacaaataaagatgaacatgaatatttagacagctatctgtcaaagagtgtgatcggaacaagagcattgtcctctgtcactgtggaacagaaagatgatggaaatggtgtgaatgttacaacacagaatatttcttattgtacatctggaatgtatcgtaacgccttgatcacagcaggaatcaagaatgctgatgtaaaagtagctggaccatttaagatttctggaactgcagcactagttggtgttatgaaagcttatgaggaaatgacaggaaagaagatttctgaaaagagcaaggatgcagcgacagatgagctgatcacaacaggagaagttgcagagaatattggttctgatgatgcagagaaattgatcgcggatgtaaaacagaaagtagcagaagataatctttcttctccatcagagatcaagcaggcaattgaagaatctgcgaatgatttaaatatcagtctttctgatgcagataaagagaaaattcagaatctgatggataagatttctgatctagacctgaatgtttcacagttaaaagaacaggcaaaagacttatatgataaattaaataatagtggaattttagaaaagattgcagcatttttcagatctgttgttaaatggattggaaatttgtttggaaactaa

SEQ ID NO: 1795 - DNA, 2307 bp, Firmicutes bacterium CAG:270
atgaaaaagactttaccaatgcttccactcagaggaaagtacatatttccgaatacggtgattcattttgatgtgtcaagaagccggtcggttaaagcaatagaagaatcaatggagcatgaccagctgatctttttaaataatcagattgatccgatggtagaagatccaggaattgatgatttatatcgtgttggaacgttagcaaggatcaagcaggtggtaaaactccctaagaatacattaagagtgtttgcagagggattattccgtgcagaacttagcaaaactgtagaatatgatccattatttaaagtagagattttatatgatcatgtggagcagcaaccatttgaagcattcgaaagagaagcatttttacgaatgatcaaagaagcatttgaaagttatgcacaggcatggtcgcatttggaccagaatattattaattatatcctgcttcagtctgatgtagagattctggtagatgaactggcaacacatattcctttttcctatccggagaaacaaaagattctggaagagatggatttaaaagagcgctgtgaactgatgctcgttatgctggaagaagaactggatgttttgaaactgaaacagaagattcagcagaaagttaaagtaaatgttgataagaatcagaaagaatatatgctcagagagcagatgaaagtaatccgtgaagaacttggtgagacaaatgtagaagatgaagcggatgaatttatgaatcagttaaaagaactgagggcatctgatgaagtcaaagaaaagatcaaaaaagagatttcaagatttcagacaatgggaaatcagacaccagaaagttctgtgttaagaacatatatcgaaacaatgctttctgtaccatgggaagaaatgagtgaggacagtacagatctagatagagcgcaggaaatcttagacgaagaccattatggcatggagaaggtaaaagagagagtgcttgaatatctggcagcacgtgcaatgagcggcaagaaagatgcagcgatcctttgcttggtaggacctccaggaacaggaaagacatcgattgcaaaatcaatcgcaagggcaacgaataagaaatatgttcgtttatctttaggtggtgtgcgtgatgaatcagaaattcgaggacacagaaagacgtatgtcggggcgatgcctggaagaatcgttgatgcattaaggaaagtcaaagtcagaaatccgctgatgttattagatgagattgataagactggaaaagatcagcgtggagatacagcgtctgcattattagaagtccttgatccagaacagaatgagaattttacagatcattatcttgaagttgctttaaatttaagtgatgtcttgtttatcgcgacagccaatgatctctctacaattccaaggccattgcttgatcgtatggagattattgaagttacaagctatacagagaatgagaaatatcacattgcaaatgattatcttgtgaagaagcagatggaagccaatggattagatgatacacagattcactggaaagaagatgcactgagatttctgatctctgattatacaagagaatctggagtcagaaatttagagagaaggatcggacaggtttcaagaaaggttgcaagagacatttaccagaagaaacacagaaaagttacgatcacaaagaaggcaatcaaagattatcttggaaaaccagtctatgaatgggagaaggatacattacgagatcagattggagttgttcatgggcttgcatggactgcagttggaggagtaacattaaagattgaagtgaatgttatgccaggaaagggtggcattcagatcacaggttctcttggggatgttatgaaagaatctgcacaggcagcgatcagttatatcagaagtcaaagtaagaaatataagatcaagaatgacttctttgaaaaacatgacattcatattcatattccagagggagcggtaccaaaagacggaccatctgccggaattacaatgacaacagcagtactctcagcgatcacagggcacaaagtttatggaaatcttgcgatgacaggagaagtaacgatccgaggggatgtccttcagattggtggattaaaagagaaacttcttgcagctaaaagacttgggatcacaaaagttttagttccaaagatgaatgaaaaagatgttaaggaatttgaagaagaagtaatcgaaggacttgagatcgtttatgtaaaaacaatgacacaagtgatcaaagaagcgttcgtacattaa

SEQ ID NO: 1796 - DNA, 1431 bp, Firmicutes bacterium CAG:270
atgcacagaattaagaaattaacagcaatactgttatgtgcaggaataatgtgtttatcttcaattgagggagtatttgcagcacagaaaccaacaggatatcattctattcatttaaatatagagtcaccgaaggaaagtcagcagaataaaacttatgcaagatcatatgccggatattataatgcagcagaacaaggtcttgtcacattagtaaagaatcaggggaatacagaactttgttgggcatttggcttggcatcgctgggtgaaacatcattaattaaacaaaagaaagtaaaaaagaatgttgattattcagaaaaacatttaggatattttatgtataatcgaacaaatgatgcgctgaataacacaaaaggagatgcaacaaaagtatcaggaaactggaaatattcaggtggaaatgcacagcttgcgatgatcacattaacaggatggtatgggctggccaacgagagtacagctccatttaataccaataaatggacattatcaagcaagcttgggcaaaaagatgctgcgattttaaaaaatggatttttccttggaaataatccatcaatcaatgtagtaaaatcttacataaaaaaatatggatcagttgttgtagcatatcatgcaccagaaacgacagaggaagatgaaaaattctacgatagatcacataaatcttataattgtacattatcagaggatgcagcaaatcatatcgtaacaattgttgggtggaatgataattacagtagagataagtttggggaggcatcaaaaccaaagagaaatggtgcatggatcataaaaaacagctggggaaacaaggaagaagacaagggatatacctatatatcttatgaagatagatctatgtgtgaatttttgtcaggtcagtttgtaaagtcatctacatataaatacaactatttttatgatggatcagcaaatccatctgcataccgattgaagaaaggtcagcagatcgctaatatatacacagcgaaaaaaggaacaaagaagaaaaaagagacgctaaaagcagtcaatgtagttacaatgaatccaaatgtaaaatacagcattcaaatatataaaaacccgaagaaaggaaaaccgacatcaggaaagaagctgttaaaacgtgctatgacaggaacgatcaaagaagcgggaacacatacgatcgatctgaagcagaaagtcagactggtcaaaggagaaaagttctctatagttattaagataggttcaacagcactcatcggatgcgatcacagtgacaattttggctggatcagatttgtgaataaaacagcaaaaggacagagttatgtctgcttgaagggaaataaatggtatgatatgtattctgcaagacttacaatgaggattaaagcatacacaacaacataa

SEQ ID NO: 1797 - DNA, 975 bp, Firmicutes bacterium CAG:270
gttaaaacaatgaaaacaaataaaaacattttggttgttatgccagtagaagatgaacataaaaaaacattagagaaacatgccaaaggaagtcattttgtatatagttcctacgacaaggtaacaccagagatgataaaagaagccaacattatcatcggaaatgtagctccattttatttaaaggaagccaaaaatctagaatggttgcagttaaattcagcaggagcagacccatatgtaaaaaagggtgtattaccggagaatgtaatcttaacaaatgcaacaggagcttatggccctggtgttgcagaacacatgttagcagtgctgttttcacttcagaagaagttacatctgtatagagataatcagaaccaatgccaatggcatgatgaaggggctgttatgtcattacgaggtggtacattactgatcgttggacttggggatattggattatactttgcaagattgatgaaaaattttggttatcacattatcggaatcaaaagaagacttggacaggtaccacaggatgttgatgaacttcatacaatggatgatctagataaattattgccagaagcagatgtagtattttccgtattaccagattcaaaagctacaagaaacatttacaataaacagcgattcaaagaaatgaaaaatacagcaattctcttaaatgcaggaagaggaagcgctgtcaatacagaagatctatgtgaagcactgattcagggagaaatctacggggcaggtttagatgtaacagatccagaaccgcttcagacacagcataaattatggaatatcgaaaatgtgatcatcacaccacatatttcaggagattttcatcatccggcaacattatatcgaattgtggatattgctgcgggaaatctgcagagatatatggcgggagatggactgatgaatgtggtggatatggagacaggatataaatcctga

SEQ ID NO: 1798 - DNA, 1851 bp, Firmicutes bacterium CAG:270
atgttagaacttggtacgatgctgtcaggccgttatgaggtgctcaagcgcgttggaagcggtggaatggcagatgtttatatggcgaaagatcataaactaaaccggaacgttgcagtgaaggtattaaaaagtgaatatgtagaagacgagaaatttttaaaaaaatttgagacagaagcacaagccgtagcaagattatcccatccaaatatcgttaatatctatgatgttgggatggaagatggcattaactatattgttatggaacttgcagaaggtattacattaaaagaatatatcagaaaaaaaggatatttaagtccaaaagaaacggtggagatttcaacgcagatcgcatccgcaatatcccatgcacataaaaatcatatcattcacagagatatcaaaccgcagaatatccttgtgtctgatactggaattattaaagttacagattttgggattgcaaaggcaacaagcagcaatacagtaacttccacagcaacagctatgggatctgtacattatatttcgccagaacaggcaaagggacgtttttgtgatgagaagagtgatatttattctttaggtatcacaatgtatgagatggttacaggtcatgttccatttgatcatgaaaatggtgtaacgatcgcattgatgcatttgcagaatgagatcacacctccaagtcagatcagggatggaattccagacagcttagaaaagatcattctaaaatgtacaatgaaaaagacggaagagcgttataagacagcagatgatctgatcgctgatctgcgacttgtatttgaagacacatctggcggttatgtaggtgttgtgccgacaatcgatgattcgccaacgattatgatcgatcagaatgagctgacacagagaatcaatataccaaagaaggatcaaaagatacaacaggaagaaccattgaaagatgaagaacagaatgcgtatcttgatgaagatgatgaggaagaatccggaatgaattctaagattgagaaattagttattgtgcttgcggcagttgttggagcaatcatattaatttcaatcattgtatttgttgtgaaaagttctggagtgttcaaatccggaaaatcaacaacgacaacaagcattggaacaacggcaggatcaaatgatgcggaatctaaaaaatatacagtcgacaactatattggaatgtcattaagtgcagcaagagagaagatcgatggcaaatttaagatcaaagtagaagaagaatattctgctgattatgcaaaggatcttgttataagacaggatccagaaagtgatacagaattagaggaaggcaaaacactgactttagttgtaagcaaaggtacaagaacagaagataaagtttctgtgccagaagttgtaggcaagagggaatcgtcagccaaaagtgagttagaagcagtaggactgaaagtatctgttaagacaaaatacagtacagatgtagcaaaaggaaaggttatttcccagtcaccaagaagtggaaatcaagttacaaagaattctacagtcgttattactgtaagccaaggtgagaaaccagagactatggtaagagtgccaaatcttcgttatttcacagaatcaggagcaagaagtgaactaaagaattcgaatttggtacttggaagtgtattaacagaatatagtgacagtgttgaaaaaggacttgttatcagacagacagtaagttcaggaagcaaagtaaaagaaggaacagcagtcggaatttatgtgagccttgggcctcgccagactgcaacaacagcagatcagggttcaacagcagatgaagaatag

SEQ ID NO: 1799 - DNA, 1329 bp, Firmicutes bacterium CAG:270
gtgacagaaaggaaagagactatgaaaatgaacgaattaatgatttatcaggtgtttccactacgagcattaacagatgggcaaccttcccatggaattttagagatgatcgactggattccacacattaagaaattaggaatgaatgctgtttacttttcaccggtattttcatcaagtgaccacggatatgatacgaaagattatcagctgatcgatgaaagacttggaacaaatgaagactttaagacaatgtgtgatgcgatgcacaaagaaggaattcaagtgatcttagatggagtatttaaccatgtgggaagagagttctttgcatttgaggatgtgaaagaaaagaaatgggactctccatacaaagactggttttatatcaattttgacggaaacagctgttatgatgatggattctggtatgaaggatgggaaggacattttgaacttgttaaattaaatcttgataatgagcaggttcgaaattatttattagaatccgttggaaaatggatggatgaacttggaattgatggattaagacttgatgttgcttatatgttaaatagaaactttatgaaagtattagtagattttgttcacagcaagaatccagaatttataatgatcggggaaatgcttcatggagattacacacagcttgtgaatccggatttacttgattctgtaacaaattatgaatgttacaaaggactttattcaagttttaacacacacaatatgcatgagatcggatattctttaaatcgtcagtttggaccagaggaatggacattatataaaggacttccgttatataactttgtcgataatcatgatgtagaaagaattgcaagtcagttagaggacaaagaacatttaccattgatctatgcaatggagtttgcaatgccaggggttcccggagtgtattatggaagtgaatggggaatggaaggaaagaaagagcaaggaagcgatgacagccttcgtccaagaatccacaaagaagacttagtggaaaatgaactgacagattatattgcaaagcttgcaaaggtaagagaggggtcaccagcattaaaatacggagattatttacagttagcgatcgcaccagatgttcttgttttccagagaagaacaaatgaagaccgtatcatatttgcaatgaactgtggagataatgaatttacagcacattttgatgcacaggccggatgcggaacagatctgatcacaggagaatctgtagattttggaggaggacttgtgatcaaaggaaaaacagcaatgataattcgaacagaagaggtatcc

SEQ ID NO: 1800 - DNA, 681 bp, Firmicutes bacterium CAG:270
atgatcacattaaagaatgtaacgaaggaatatgataaagagaatacaggacttaccaatgtatcacttgatgtagagaagggcgagtttgtatttatcgttggcaaaagtggttcaggaaagacgacacttatgaagcttttgcagaaagaacttgaaccaacaagtggtcagatcatagttaatggacagaattataaagaattaaaacgcaaggaacttccgaaacttcgaaggcagatgggaatggtatttcaggatttccgtctgcttaaggatcggaccatctttgagaatgtggcttttgcgcagaaagttgtagaggctccaaaccgctatatcaagcgtcaagtggagaatatgcttgacatggtaggactcaaagatcgtatgaaagcatttccgaatgaattatcaggaggagaacaacaaagggtagcgattgccagagcacttgtcaatcatccggtattactgctggcagacgaaccaacagggaatcttgaccctgtgacggcaagggaaatcatggaacttttgtcagagatcaataagaaaggaacaacagtattggttgttacacataatcgtgaacttgtgaatgagatgggaaaacgagttatccagatcgaagatggacagatacagcaggatgaagctagggggttctatgatatttag

SEQ ID NO: 1801 - DNA, 5223 bp, Anaerotruncus colihominis
atgagtgagcaggagaaagcaagagaaaagcaggtcccggaggaggaaaacacacacgcaggacaggaaacgccgcaggaaacagcgtccgtgccaaaagacgccaaaccggagcagccggtcgcaaattcaggcggggatgccggtgctgtgcggccgtcgggcggaaaaaagttccgctggcagaagcggtattcggcgctgctggccgcggcgctgtttgttgtgatcggcgttgcggcgctgatacggcaaagcgcgccggccgagccggccggcgcgcctgcttcaagcatggcgccgtcctccgcgcagccgggcgatgactttgaatatccagagaacgaggcgattgatgcggctgttttctcgtcaattcatctgcttgacgagggctttgtcgagatcgtaccgcagtcatggtttgggaataacaacgacgacatccccctgacgcttgaatatctgcaaaactgcctggagctttcgccttcgcatccattcactgtgacggaggagcaggggacgtttcgcgtttatattgagggcatggagaaaaacagttgggtcgatttgatcctgccgtacagggatggcggggaggaggacgcgcgccggtatacggccaacacaggactgtgcggatggcttgatctgaagtccggatacggcggcgcggcgatcgacgcgccggtccgtgtggaattcaatgctccggtatctccggagtccgcgcgcggccgcgtgctcctgcggcagggcgaggccggtcccgatcagattgcgccggccataccgtgcgatgtgtcgtatgaggagcgcgccgtactgcttacgccgcatgagatgctcgactatggcgcatattatacagttgagctggccagtacgcttgtatcggtggacggcgcgcggatgggaaagctggacagtctgccgttttcaaccgagcagcgcgcattttccatttcagttgtggacggcaatacaaacttattccggccgggcgcggatatcgagctgacatttgaggtgaaaacggaatggagccagggcgtcgacgccaaaaccgagctgttcaggctgacgggagtcgaggcgtatcaggcggtattgacaggcgcggacacacagcctgacgaggccggggataccgggacggtacatctggacgacggctttgcatccgtgacctatgacaatcccggcgtgggatactatctgttccgatgctcggtgatggaccagaaaaccggcgaaccggtggtgatcgagaaaccgtttatggtttccacaacggccgtctatttgcaggctgccggtgaaagcgatttgatctggcttaacgactgcgcatccggcgaggcgctcggcggttataccgttgtattcacgcaggcaggcgaacaggtcgcgcgcttcgtgacagaagcggacgggacggctctgttcagccatacggtcgttgcaaaaacgccaacctggggaggactggacgctgacagcgactgcatcttcacaatttatgacccggatggaaaagcggtttacaccgaccggaccgcgtgtcttgggtgggacagccagaccgaggaaaggtattattcatttttctacctcgaccgcgcgctgtaccggccgacggatacggtgaatttctggggctatgtcaagccgtaccgtatgaaccggggcgctatgcccacccaggtagaggtggtatttgacgaaggcggccttgacgaacgcgtgacggtttcgctgaacgcggacgggacgttttccggttcgctctcatatgaacaggtggccagctcgcagtatggcatatcggcccgtatgctcctgccgccgccatacctggaggatagcagcggcaatccggttacgacgcatcatatcgataccatatgggtcgacattaaggattttgtgacgccggcgtatacgatttcatcgtcggtcgacaagccgatttaccgttcgggcgatactgtttcaatcaccatcacacccacgttttatgacggtacgccgctgccggattatccgatcgaattcagcgtgtttaaccccacgagcggcaattttgaggcgattcagaagctgacgaccgacgaaaagggcgttgcatatgcggcgatcaaggccggcgagaatatgacggcctattcctggaggccgacttatggctattattacatcaagatcgcaaatgacggcgaaaccgtttcccaccagggaagctacatttacacgccgggcaatgtgattctgcgcccggaggttacgtttgacgcgcatggagcgcggctgcaggtgcttgccaacagcgtcacgctcgaaggcgtcagggacgccgaacaggcgcagcggttggccgatgcatatgatgatgacgcttacgacgttctgatcggcgatccggtcgacatgcagttgtccgtggagacggatttgcgctactttatgccgcgtgagcagggggaggatgatacgtccgaccggcacatatgggacgaagaaaacatcgtcgccgtcgaggtgaaggacggcgctggcacggcagagctgctcgccgccggcgcgttcgacccgtcagaatatgggtgggtttccgtcacagcatcgtatgtgcatgacggtaatacgctctcaagcagcgccagcgcctcctacagcggcggccgtcggcgtgcttatagaggaacggatgaaaccgcgccgaagggatatacgttcaatgtttaccgcggcgacgagccggagccggtccagacgtatgaggaatatcttggacgcagctttgttgagacggatgtgggcgtgccgctccagttcgagctgctgcgcgacggcgtcccggtacagggcggccgtatgatctatacgcttgtgcaggacgatatcatcgggcgcggcagcgcggacacggcgcttacgctgacgccggaccaaaaacacgcgaacagtgtcctgctcgtggcggcatattttgacggacacgatgtatacgcggtcgccaactgttatatccgcatcaaccaggagagccttgcgctggagattgaaacggcgcttgacaaagaagcgtatatgcccggcgacacggtgacgctgtcagcgaaggtgcgcgacaaaaacggcaatccggtatcagcgcagatgtgtgtcagcatcgtcgacgaggctgtgttcgctctgcgcgagcaatactttgatattctggcgtcgctttacggggagatgaatttttataattattatatttataagtatacgtccctgactggcgacatcaacccgtttaacaacagcggcgacggcggaaagggcgcgggcgacaatctggaggcatatgatatcttccgcgacgacttccgtgatacagccttctttaaaccgctgcaaagcgatcaggacggcagcgcgtccctgtcgttcacactgccggacaatatcacctcctggcggatcacaacgctggctgtgggcaataacctatatgccggagcgtcaaaatcaaatctggttacgacgctgccgttctttaccaagccggttctcagcccgaaatatattgagggcgacgaggtcacaatgcttattcaaggacacggcacagcggttaaaacaggcgatgtgatcagctatgaggtacgcgtcaccggcgacggcgtagataaaacttatacgcgcagcggtacggcatatgagccggttgagatcaatctcggcaagctggccgaaggagactataccgtcacgtcgaccggacagttcggacagatgcgcgatacagttgaactgccgctgtccgtcatcagcagcaatctggaactgattgtcaaccgtgaaatcgacctgcaaaagccggtcgatatcgaggcgctgcgctatccagtcgtcatcacgctgtatgacgacgcatacagggcgtataacgacagcatcagttcactgctgcgccattactgtttccgtatcgatcagcgcatggcgcgctttgcggccaaacgcgcgctgatgcagtttggcgactcggaggatctgccgcgccatatccgcgtcagcgacagcgacgtgttgggctatcagaactttgacggcggtatcggctggtatacctacagcgatcagtccgatccggtcgtcacgatgaaggtgttgatgttcgcgggcgacatgtatgatctggagcgcatgaaaggttatttcgaggcggttaaggacgatcagacacgcggcgggactgagcgggcggctgcatatgccgggctggcggcaatcgatccggcttatacggcggatatccgggagatactcgcctcacagccggatatgaagctgaaggaacagctctattatgtcgccggcctggcctatggaggcgacgaagcgggcgcgctggcgtattacgaaaagtttgtcacgccgcgcctgcgccatgatatggagggcgcaaaatggcttgaatattcaaacgcggtacaggaatatgaacgcttgaaggaaaacgacgatgtgacggccgccgcatggatcacggcctcaatgctcaaccttccggatgcggacggctttgcggcgcattttgcacgcaacagatggcgtatcgattccatttttgaatgcatgatctacgtggtcaattacgggacgcctgcgacaaaagcggcgaaattcagctacacatccggcggcgagctgcacgaggtggatctggcgggttatggacgcaaatcgatcaccctcaatcgaagcgaaatgcaggatttggcgtttcacgacgtgccggactcggtgcgggcggctgcgtactatattggcgaaccggaggaggcaggctttgaaggttccggaaatatcagtatgcaaaaggattttcaggagatggaggacgggaaatacaaggtgacgctcacagttacatttgaggatgacgcgccatatgggttttacaatatcagcgattgggttccgtcaaacatgcgcctgcacacgatcgccaagcagccgcaaagctccagggtggaggtgcacagtgaacaggaaaaccagaagctgtattttgatttttaccgcacagcttatacgccgaaaaccgtctatatcaactattacacacagcgcaccttcgatacgcaggcagtggccgaccgcgcgtacctgatctgcgcggaaaccggagacagtgcctttacagagcgcggccggatttga

SEQ ID NO: 1802 - DNA, 5124 bp, Anaerotruncus colihominis
atgagggaccgccaagggagggaaaccagtatgacaaaaaaacgatggctgattccggtgctggtgctgctggtgattataagcgcggccagcgcggcattttttctttcgcggccggagggcgatatgatctatgcatccgtcaatatccagccgcaggagcaggagagcacagagccgctcgcgcctgaaagtacgtttgccattacgcttgattacagcgtgtcgcaggagcagttgcgtgcaatgctgtccattgaacctgatatcggggaatatacgattgaaggaagcgggaaaaaatggacgctgcgtccggcagtcccgctggaggaaaatacggtttacaccgtccgcgtgatcaatccggataccggtgcggcggtgcagtcgtttgcctttcagacacgcagcgatctgctggtgaacacggtttatcccggcgacggcgaaacctttgtgccgctggaaacgggaatcgaaatgactttcaacgcgcaggatgttgatctgcaaaactattttgaaatcaagccggctgttgccggaagcttcgagacaaacggctatacagttatctttaaacccacggagccgctgacggccaacagcatttaccgggtgacgctcaaagccggattgacggcgccgggcggtatggcgcttaaagaggattatacgttttcgtttgagacggtgcaggcagaggatgcgcagcgcgattatgagaagctgcggcttgacggcccgtatgcggagacctttttgccgggcgatccgctgacagtcaagctgcaaagcggcggcgaggtatccgggctgccctttgaggtcaaaatccatcgttatggcgacatcagcggatatatgaaagagctgcgcgcatatgacgcgttctatcgggagcggtacggcgaaaagacagaatatgtcgccaatacgaccggtctggaagaagttgcgtcttataccggcgagctgttttccaaagatgacggatggggcgaattgtatgcgatcctgccggatgatctgggggaaggctggtatgtcgtcacaatctccggggaggacgcttccggcgccgaccagtttgtacaaaagctgatccaggtctgtaatttaagcgtttatacacagtcggccgacggcgacacattgttttggctcaatgatcccgcaaccggcgagccggttgcaaaagccacgctccagcttgaggacgtgaacggtgaaggcgagttcccagcggttacaatggccgatggaacggcgcgcgtgatgacaggggaaagcgaagccgcttatttgacggtgctgcgcgatggaaagagcgtctatttcgcgcgcgcgcccctgtcgcaggcggtcgagacgccgccgttgtccgaacggtattatacggcgctttatactgaccgcgaagcttaccagccgtcggataccatccatttttggggcgttgtcaagccgcgctccggcgacggcacgctgccgcagagcgtatgggtgtcgctttccacctcatggccgcgtgcggaggtttaccgcgtgaaagcggctgtcaatgaggcggacggcacgtttgaaggcgcgattgccgtaaccggcatcgccaaggattattatgagctttccgttaacgatggagagcagggcgtttacacctccaaggggctttcgctcgaaaagtacataaagccgccgtatgaaatcagtgtggctttggataaggaccactattattttgatgaagcggttggcgtttccattacggtgcgttattttgacggtacgcctgtttcaaatgaaacgcttacgctgacaggcgcttacattaccgagcaatccgtgacgcttgacgcatccggccgcgcgaactgcacagtcaggctgaaagcgccgaacgatgaaaacgatccgatgggctggtcgccgcgcagcctctggattgaggcgcacaatgcgagcgcccaggacgtctatgtttccggcagcgccaatgcggcggtcctgccttcgcgcgtcgcgctcaagctggagggcgattccctggagaagctgacggtgcgcacggcgcagctcgatgatacgaaattaaacgacggtcattccgtcagcccgctgaaaatttatgacagcgaatatgaccggctggcgggcgcgcctgtcgatgtgccggtgacggtgctgatccacagcgtcacacgccgtcaggtggaaaccggaagttattatgattatgtcaataaacgcacggtgacagaatatgaaacgcagcttgacgaggcggtcgccgaaacgatcgagacaaagacaagcggcggggttgttgcaattgaggggctggattacaaaaatacggacgatacaacctattgggccgaggcgcgcgttgacggcggcgcggccggcacggtttctgaaacaaaccggttcggcacgcggccttacggattcagaggcgacacgccggtttatacctttgtcaatccggacgatgaagccgcgaacgcaccggtcgatgtgggcgatgcgatcacgcttgggctgtaccgcaacggtgtaaaaaccgaaaataccggccgtgtgctttacagcgtattgcagcgccggtcgctcaaaaatggaatctttgaaggggattcgcagacgttaacaatggaggaaagcttcctgccgaacgttgtcattgcgggcgcctattttgacgggcggcatatctatgccgtggaggaatatgcggttgattatgattacacggacaagggattgaatgtgacggccgagacggacaaagaaacgtaccggcccggcgaaacggcgacggtgacgctcaagctgacggacgcggcgggaaatcctgtgtccggctccgtctgtgtgggcgtggccgacgaggcggtgttcgacgtcgcggagcagcacgcagagctgcttgaccagctttacagggcggtctattatccgcgcctgcggcgcagcctgtcgtatgcggaatatgataccggcgctgatgaaaaggcaggtgccgaatcaggggacggggcggtcccgatgagcgccaataccggcggcaacgcgggcggcgtattgctgcgcgaggactttgcagacacggcgctgtttaaaacggcgaaggccgatgaaaacgggcaggcaaccgtaacctttgagctgccggacaatgtaacctcatggcgcatcacggcgctggctgtgacaaacgatctgaaggccggcgacacggccgaacttgcggccgcaacgctgccgttttacctgtcgccgctctatacggatacgtatctggagggcgacgacgttgtgatcgcggcaggtgccgttgggaccggtgcgcataccggcgacgcggtttcgtatacagtgacgatcgccgacgccgcgggcagggagcttgacaaacagaccgccgaaggaaccatcggcgtgcgcgtgccgtttaccttcggcaagctggaggcgggcgcttatacgctgacgatagaaggcgtgtgcggtgaaaacagcgacgctgtgcgttatccgttttctgttgtaaagcaggcgctgacaacgccggtttatgaaaatatgccgctcaaggacgccgttaacattgaatcggtgcgttatccggtaaagctgatggtgtacgaccggcggatgcagccttatatggaaggtttgcagtatctttccatgcaggcgggcgaacgcacggagatcatcgcggctgcgtaccgcgcgcagcttgcatacaatgagctgttggacgaagcggaccgcgagccggtgcgccgggacagccgtctggatgatatccagaatgacgacggcggcgtgcggctgctgcctgtgtctgaaagcgacgccgctgtgacggccaagatgctggttgcggctccggaactgatcaacaagggcgcggcgcgcgattatctcaagggcgtgctccaggacccggccgctacgcaggacgaccgcgtcatggcctatctggggctggcggcggcaaaggaaccgattttgcttgatctgctgcgcatcatctctgaggagggcgcgtccatgacagacgcgcagcgcctctatctggggaccgggcttgcgctgcttggagactttacatcggctgatcttgtttataattcgcttggcggccgcctggttaaggacggagatatgctctatgccgaaggcgcggacggcacgctcgacgcgcgcattcaaacgtcggctgcggcgctgatgcttgcgtcggttacatccaatccggacgccgacgcgctgatgcgctatatgaataaccttgaccaggaccgtgcaaagagctacagcacaattgccaatttggagatgctttgctatatcaattcgtttataccatcacagaaaggagcggaaagtttcagctacacggatacgcagggtgaaacccagaaacgaaccctggaaaacggcggtgtggagccgctttccatgagctatgaggcgctggcggccgcggatttccaggcaaacgatcatgtatatgcctgtgcgctttacacaggttatgcagacgcagcgcagatcccggacgacgagcgcgtacagatcatcaagacgtacacgccggtcgccggcgatgggatcggcgtttccgacagggtacgcgtcgatttgacggtgcgcttttcagatgacgcgcctgacggctgctatatcgtctccgattacatcccgtccggtatgcgttatatggaagacgccggtatttccgggatcaatccatactttgattggatgtggggccggatcgacaatgaaggccaggccgtttttgggcgtatctaccgcaatattgccgtttggcgcgagacacaggcggcgcgcgccggacagcaggccggtgaaagggcggccccgctgactgacagcgcggcggccgaagaaaagaggatcccttcaacaagcggtatggtggtgcaggaggacacgaatgtatataccctgacatattatgtcagcgcggcgcttccgggcgaatttgtttcggaaagcgcatatgtaaccccgtatatcgagggcgcggccgctaagagcgagcgcggcacggtaacgattgaggcggagagctga

SEQ ID NO: 1803 - DNA, 2742 bp, Anaerotruncus colihominis
atgggtctgattaaaaaactgttcggaagctattccgagcgagagttaaagcgcgtttatccgatccagcaaaaggttcttgcgctggaagaaacatataaggccaaaagcgacgccgagctgaaggctgtgacgccggcgcttaaagaacgcctggcaaacggcgagacgctcgacgatattctgccggacgcgttcgctgtctgccgcgaggcgagcgaccgcgtgcttgggatgcgccatttcccagtgcaggtcatcggcggcatcatccttcatcaggggcgtatctccgagatgcgcaccggcgaaggaaagacgcttgtcgccacgctgcccgcttatctcaacgccctgaccggcaagggcgtgcacatcgtcaccgtcaacgattatctggccaagcgcgactccgagtggatgggcaaggtctaccgtttcctcggcctgtcggtcggtctgattatccacggccttgatacgcagcagcggcgcgacgcctacgcctgcgatatcacctatgggaccaacaacgagttcggctttgattacctgcgcgacaacatggtcatctacaagcgcgacaaggtgcagcgcggccacaactacgccatcgttgacgaggtggactccatcctgatcgacgaggcgcgcacgccgctgattatctccggccagggcgacaagtcgaccgacctttatgagcgcgccgaccgctttgcacgcacgctcaaatgctaccgcgtcgccgagacggactcgaaagaggagcatgacgacgtcgacggcgattatatcgtcgatgaaaaagccaaaacagtcacgctgaccgcctccggcgtcacaaaggcggaggaatatttcggtgtggaaaacctgaccgacggcgacaatatgcagctccagcaccacatcaaccaggccatccgcgcccacggcatcatgcagcgcgacgtggactatgtcgttaaggacggcgaagtcattatcgtcgacgaatacaccggccgcctgatgctcggccgccgctataacgaggggctgcaccaggccatcgaggccaaggagggcgtcaaggtcgagcgcgagagcaaaacgctcgcgaccgtcactttccaaaactttttccgtatgtacgacaagctcgccggtatgaccggtacggcgatgaccgaggccgacgagtttatggagatctataagctcgacgtcatcgaaatcccgacgaacaagcccgtccagcgcgtcgaccaccacgacgttgtttacaagactgaaaaagcgaaattcaacgcggtcattgaaaacattgtcgaatgtcacgaaaagggacagcctgttctggtcggtacgatttcaatcgaaaagtcggagctgctctccgggatgctcaagcgccgcggcatcaggcacgaggtgctcaacgccaaataccacgagaaggaagccgagatcgtcgcacaggccggccagtacggcgcggtcacaatcgcaacgaacatggccggacgcggtaccgatatcatgctcggcggcaacgcggaatatatggccaaggcacagttgcgcaaggccggttatgacgacgaggtgatcagcgaggcgacgggctttgccgacacggacgacgagcaggtaagcgaggcgcgccagatgttccgcgagctgatggatcagtaccgcgctgaaatttccgttgaagcggagaaggtgcgcgcggctggcggcctgtttatcatcggtacggagcgccacgaatcccgccgcatcgacaaccagctccgcggccgcgcaggccgccagggagatccgggcgagacgcgctttttcatgtcgctggaggacgacctgatgcgtctgttcggcggcgagcgcatccagaatatgatgaacatgattggcgccgacgacgatatgccgatcgaagcgaagattctgaccaactcgattgaatcggcgcaggcaaaggttgaggcgcgtaacttcggcatccgtaaaaacgtcctccagttcgacgacgttatgaaccgccagcgcgaaattatctattcacagcgcgacaaggtgcttgacggcgaggatatcagcggcatcatcaagaacatgatcaaggagacgatcgattccaccgttgaccgttatcttgttgataaagaggtccatgacaactggaatctcgagggcttgcgcgactacttcctcggctggctgacaacgcaggaggatctgcgctacacgaccgaacagctcggcgaggtgacagaccagcagatcaaggatatgctgggcgaccgcgctgaaaagatctatgcagcgcgcgaggcgcagttcaccccgccgatcacgcgcgagatcgagcgcgtcgtgctgctgcgcaatgtcgatatgaagtggatgcagcacatcgacgacatggaggaactcaaacgcggcatgcacctgcgcggctacgcgcagaaggacccggttgtcgaataccgtatcgagggctttgacatgttcgacgcaatgatcgaatcgatccgcgaggacacggtcaagatgatgtttacaatccgcctgcgcactaacgaggagccaaagcgcgagcaggttgccaagcccgctcaggagagccgcggcgaaagcgacggcacgcttgaaaaccgtccccgcaccgtcaaaaaggtcgggcgaaacgatccctgtccctgcggaagcggcaagaagtacaagaagtgctgcggccgcgacgccgaataa

SEQ ID NO: 1804 - DNA, 4704 bp, Anaerotruncus colihominis
atgcatatggtctggaaaagattcacggcgttttgtttggcggctgcgatgatggcggcaaatgtcgccgatgtggcgctgctggccgcgccgtttacaacgaatgcgcgcgcttcaagcgatgttgaggctgcgacgcttggttttataaagaaatcatgggacgatgataaggaccatccagaacgcacaacggttgtttcaggcggttcggtcgatctgtcggtttccattaaatctgggtatgaggaaaacaaggaaaccagcttcaattatgattcgacagacggaacagcgcctcagggcgatgatatagtgatcacgggaactggaaatacacgccgcctggatgtatcggatagttttccaacgattgagaagcagacggtaatgataacgggcaactattatgcgatcaagggacagggcaaggcgcttgagaaaatcaatggcgctgaccgtaccaagattgacgcaacggtcgacccggaacggattatgcagtacggcgaattgaccataaaagcaacccagggtgaaattgtcgcaaatggaaagtcccagggcggagctacatttactgttacagcgccggagtttctttcaaacggcggcgcggaaaacggtctgtatggatataacggcggcacggtgggttccagaagggcagataatggcgatttgatcgttgaaatccatccgccggcaagtacggcaggcaggctggatgatttgacctttacaattacgccatccaaggtatatgagtatttcgttacaccggataaacagaattcggccggtacaaataacttttatttaaaagaggacggtacgccatatgcggacgacgaattgctcgacaatggactgccgcctgtcaagacgatgaacgacgttattcagaaggatgaggaaatcacattttatctggatttgccaaaatcgaatacactgctgttgacggtcatcaaggcaacggcggcagtggaggaaattgccaacgatatcaaaatcagcgccaaccgcaacgatgaaaaatttatcaagctcgatccgggtgatgcgttgaattggatcacgactgatttttcgctgcgcaattatcaaaatcaatataacgacaaatttacaatttcatgggactggaaggccgacgattccgcctatcaggataatgtccatattggcgagagcaacaatgagtggatcggcgcgaccattgagcgcgaaataaccgatgtaaagggtaagcttctttatacagtaaccttcaaggatcgaaacggcaaggaaacgaaatccgctcagcaggagattgatattgtcatccgcggcactggagatccgccagtagcgacgttgacagcccaatggctcaataaagatgatctgagcagcggcgtcaacgatgacgccaataagatccccatgaatacggagcttaacaacaacggcacgcagctcaagatggacgtctacaagggcggcgtcatcgggtacaagaacccgcagagtccgtaccgttatgaaatcaccgccagcatgggtgcgcgccaaagctgggcaaagtatatgatcattgatgcgtctggcagcacggatgcggtcacagtacaattgaatacaaccagcggtattcaggattatacgtttggcagcgaatttaataacccgtcaatcagcaacaaggatacagcggttaatatccccgttcagattaatgcggcaaaaccgggaactgtaacgctgacatttcgcttttttgtagaggattcaaagggtaatcctgtggaattggattacaagccccgtgtgacaattacggtcgtcgatacctccccaagcgaggatgcgacgctttcgtcgcttgttatgaaggatccgaagggtcagtcgatcgatttcggcttcactccggaggcgacacagccgtttgaaattaaggtgccgttcaagacggaatcgattacgttggaagcgttccgcaacgacgacgcggccaacaagatgatcgcctattacgcctatcaccgggatggcggattgacgccggtttatggtacggaggacaatccggaaaaggtggaggccggcaagccgacagataagattccgttaaccgagaatgtcccggtttacattgaagtgacggtgacggcgcagaatccaaattttacaaagacatatacgctccaggtgacgcggactccggccagcaccgatgcaacgctctccaacatcgagatttacgatgagagcgacaccgatatgaaaaacaactatctgaaggactttaaccctctccagatggacggctatatgatcgaagtgccgtataagacggactggctgcgtgtgaaggtaccgacaactgacccaaatgccgccgttcagtgcgatccaaagctggaaaataaggttttgtttggcgatccggaatggatcaggctcagtaaaatgacgccgaacgaccagggcgtgtatgtgctgaaggtcaaggttgtttctgagcagagcattgaccgttcggcaaataagcagcccgattttacgaaacccgaccgcgaatacaccgtgcagatacgccggcgcgatccaagcgatgtatcgacgctgacagagttgaaggtatatgatactgacgataaacagttgacgctttcaccggcctttacagcggctcagagcgattacaccctgcgcgttccgttttcaacgtcaaaaatcagggcgtcggtcaaaccgcaggaggattctgtcagccgtatctttgcagtttatggacgccgcggccagagcgattacaagaagtggaaaactgttgatatcaatccggacggttcgatctccaaggatattccggtagacttcattacggcggcttacgaccacgatgaaatctggattgttgtcggatccgaaatggcatatggttatacggagcaggaattgatcaagatggtgattgacggcgacaagtcggaatatgtttcggtttaccgtatacgtgtggagcgcgccgaaccgagcgacgatgcgacgctgaaatcactcgtaatcaatgaccaggacggcgttgatacaaagaagatttcgttcaatccggatgttgagacgtatgaaatcagcgtgccttatgagacaagagaggttagctttgtgccgacagcgaaccacgagggcgcgcgcattaaaatccagagcaatcgagacagtattttgccaggcgttataccgcccagatggtacactgtgaatagtggaacagcgtcaaagaactttgacttgccctatgcggtcggcgatgcgacaacgacctttacaatccgtgttgaggcggaaaattacgattatgttgacccgccttcttataaagagtacatcgtcaagatcacacgtgaggagccgagccatgatgcatatctgaaagcgctttcggcgaccaacaccgagaattggcagccggacccgtttatcaggacaacgcttgattatgaggcgacggtcaaggaggggtcgtcaaccgtaaccattacggcgacaaccaatcatccgggtgcaacgcttacaatcaatggaatggcggctcagagcggcgtcgcaagtgatccgatcgatctggtcgatatttatacaacgattgagattgtggtaacggcgcaggacggcaccacaaagatgacgtacacgatcgagttttacaatcagaacctggttgaaaaaacaaacaatgctgatctgcgcagcctcaaggtcaattatgggttgatgacgccgaagttcaagccggcagtcactgaatatgaggtgacggccacggaggatacatattcggtcgatatcatcccgcgcacggacgaccggcttgcgacttatgaggttttcgccgggaccaggaagataggcgattacaataataattacgccttggcgcttgaggatggagaaaatgaggtgcgcattgtcgttacatcgccggataagactgtgacgaaggaatataccgtcatgatctaccgcaatgaggaggataagctgaaaaatctgaccccgcttgaatcagaggatgtcgattatgagggcagcggcgacacaatcatcattatgattgaccagtatccgcgcattggagcaagcgtttttgaggaattgaaaaattatccggacaagacaatcattttccagggcaacgattattcattggaatttaaggcatccgatcttgcaggccgcgtgattccctcgacagagatttacgatttccgcatgtcgttcagtccgccggatgaacaggaggatgcgatctgggacatcatcgagtcacgcagcggcaatgatgatctcacctccagccgggttgtaatggcgtacttcccgcatcacggatcactgcctgcgaccgcgatcctgcatatgtccattggaaagcggtacggtaatgaaaccatctactggcattattacaacgaggaacgtgatagaatcgactattacggaccggttcagacaaacgcacagggcaccttcgcggttaagatcgaccatttttcgacctatgtgatgacggagcgtcactccatcgtcggcgctgaactgcgtgtgggtgaaaccacattggctccggacggcggatttttgaatgacgcggcggatatcgtcaaggtcaatccttcgacgggtgccgcaaaggagtgtaaatga

SEQ ID NO: 1805 - DNA, 3546 bp, Anaerotruncus colihominis
atggcaagaaaaatgaaaaccatggatggaaacaacgccgcggcgcacgtatcgtatgcgttcaccgatctggccgcgatctatccgatcacgccgtcgtctgtgatggctgaggttacggacgagtggtcctcgcagggccgcaaaaatatcttcggcaatgaagtcaaggttgtcgaaatgcagtccgaagccggcgcggccggtacggttcacggctcgctggccgccggcgcgctgaccaccacgtttaccgcttcccagggcttgctgctcatgatcccgaatatgtacaaaatggctggcgagctgctgccgggcgtcatcgatgtttccgcgcgctgcgtcgcttcccatgctctgaacatcttcggcgaccactccgacgtttacgcctgccgccagaccggttttgccatgctctgcgaaggcagcgtccaggaggtcatggacctgacggccgtcgcccactgcgccgccatcaagggccgcgtgccgttcctcaacttcttcgacggcttccgcacctcccatgaaatccagaaggtcgaggtctgggattacgaggacctcaacgagatggtcgaccacgacgcgatcgacgcgttccgccgccgcgccctcaatccggagcatcctgtcctgcgcggctccgcccagaatcctgatatcttcttcaccgcgcgcgagagctgcaacaaattctacgacgccgtcccgggcatcgttgaagaatatatggacaaggtcaacgccaaaattggcactgactacaagctctttaactactacggcgcgcccgacgccgacaacgtcatcattgcgatgggttccgtctgcgagacgatcgatgagacgatcgattatctcaacgcgcacggcaaaaaggtcggcctgatcaaggtccgcctgtaccgtccgtttgcggccgaccgtctgatcgccgcgatcccgtccacggtcaaatccatttccgtgctcgaccgcaccaaggagcccggcgctttcggcgagccgctgttcctcgatgttgtcgccgcgctcaagggcacgcagtttgccaacgtccctgtatacggcggccgctatggccttggttcccgcgacacgacgccggcgcagatcatcgccgtgtacaagaacggcgaaaccggcgcgaaggaacgcttcaccatcggcatcgaggacgatgtcacgttcctgtccctgccgattgatgagaacccgaacaccgctccggacggcacaaccgcctgcaaattctggggcctcggctccgacggcaccgtcggcgcgaacaaaaactccatcaagatcatcggcgaccataccgatatgtatgcgcaggcctatttcgcttatgactccaagaagtcaggcggcgtcaccgtttcgcatctgcgtttcggccataccccgatccactccacctatctgatcagcaaggcgaatttcgtcgcgtgccacaacccgtcatatatcaccaagtacgacatggttgaggatctcgtcgacggcggcaccttcctgctcaactgcccgtggagcgcagaggagcttgaggagcgcctgcccggcaaggtcaaacgcttcatcgcacagcataacatccagttctacacaatcgacggcatcgacatcggccgcaagctcggcctgggcacccgcatcaacaccgtgcttcagtccgcgttcttcaagctggccaagatcattgacgaagccgacgcaatcaaatatatgaaggacgccgcgaccaaatcctacggcgccaagggcgacaaggtcgtcaagatgaaccacgatgccatcgacgagggcgcaaaggctgtcgtcaaggtcgacgtcccggcttcctgggcaaacgccgccgatgacgcgaccgacgcgaaggctgtcggcgagcgcaaggatctcgttgattttgtcaacaacatcctcatcccggccaacgcacagcgcggcgaaaagcttcctgtttccacgttcgtcggcgccgaggacggcacgttcccgcagggttccgccgcttatgagaagcgcggcatcgccgtcgacacgccgtgctggattccggacaactgcatccagtgcaacttctgctcgtatgtttgcccacacgctgtcatccgcccggccgtcatgaccgccgaggaagccgaaaaggcccccgagggtatgaagatggtcgatatgaccggtatgcccggctacaagttcggcatgacgatttccgtgctcgactgcaccggctgcggctcgtgtgcgaatgtctgcccgggcaagcgcggcaacaaggcgctcgagatgaagaagctcgacacgcagcttgcacagcaggaaatcttcgcttacggccagtccctgccggtcaagccggaagtgaacgagaagttcaaggagacaacggtcaagggcagccagttcaaacagccgctgcttgaattctccggcgcgtgcgcgggctgcggcgaaaccccgtatgccaagctgatcacacagctctacggcgaccggatgtatatcgccaacgccaccggctgttcctccatctggggcggttccgcgccgtcgacgccgtacaccgtcaacaaggacggccatggtccggcttgggctaactccctgtttgaagacaacgccgaatacggctatggtatgttcctggctcagaacaccctgcgccagcagctcgtttccaaggttctcgagctttccaagagcactgacaaggctgatgtgaaggctgcctgcgaggcgtacctctccacggttgacgacggcagcgccaacaagctggcgacgatcaagctgattgaggcgctcgaagcctgcggctgtgacgcggctaaggcgattctcaaagataaggagttcttggccaagaagtccaactgggtcttcggcggtgacggatgggcgttcgatatcggttacggcggccttgaccatgtcatcgcttccggcgaggatatcaacatcttctgcttcaacaccgaggtttactccaatacgggcggtcagtcctccaaggcgaccccgaccggtgctgtcgcgcagttcgccgcggccggcaagaccatcaagcagaaagacctggccgctatggcgatgagctacggctatgtctatgttgcgcaggtcgcgatgggcgctgactacaatcagtgcatcaaggcgatcaccgaggcggaaagctatcacggtccgtcgctcatcatcgcttacgcgccgtgcatcaaccacggcatcaagggcggcatgggcattgcgcagaccgagatcaagcgcgctgtcgaggccggttactggcatatgttccgctacgatccgcgcctcgagcttgagggcaagaatccgttccagctcgattccaaggcgccgtccgcggactataaggccttcatctccaacgaggtccgttacagctcgctggcccgctccttcccggatcgcgccgaggagctgtccgagaaggctgccaagaccgctgccgaccgttaccagcacctgctcaagctctccaagctctacgcggttgagtaa

SEQ ID NO: 1806 - DNA, 4686 bp, Anaerotruncus colihominis
atgggacagaggctggtgtttcagcctggggatgggctggagctggaaattaaggaggaaaacaagatggaactgctggaacaatgccaaatttggaatgaaaacgacgaataccaaaagatcattgatgcgctggaggctgtccctgccggggagcgtaccccggagatggacagcgaactggcacgggcctacaacaatctggcggaacttggggatcgggagctgtttaaaaaagcgattgctctgctggccccccatgaggaatattttgaaggcgaccattgctggaatttccgcatgggttattcctattactatctcgaccaagagggccgggcactgccttatttccgcaaggcgctggaggcccgtcccggcgacgaggattcgcagatgctcataaatgactgtgaaaagcgtatcaccctcccacgatttgaaaaatgcttccgggagcggacagaggcggcatgggaagcctttgcccaacaggaggccgggctgcgccgatttatggacgaggataaaaaccgtgaacgcggcgaggaattgatcgggcagtgcgaaaaaatcctgaactttgcttttgacgaaatctgttttgagatgggcttcaatggaaaaaagcatgagctgatcctcaccccggagggaaatcgggtgaagctgttccagcttgtttactttcagaagcacgcgcccaaagaggtgctggagcactggaacatcctggtgggccgccagtccaatccgaacatcggcctgcgctctggcggctgggagatttccggagatgatgtgcagctctggttggaacagcagggcgaaaacagctttgctctctcagcctactgtgaaaaactgctgcccctgctccgggaggatgagaaccgggtatggtggattctcaccaacctcaccgaccaggtgctgggcgaaatcccccatatgagatacatagactcttttgatatgctggagactcccagagaggagccttgcgttctcctctcgaagctgccggacgagttaaaagggatggggcttgacctttccatcgacccggaggttcttttggagagctatactgggtatgagatgaaaccggatgaaaatcccgatgctgattggcggctggatattatcgccggcatcacctgctgcccgccttttatcaacgactacatgagtgcggagagtggctgcatggacgattttcacgctgacggcgctgtggcgggctttttctgttatcctctggataccctgcgcgatgagaacggcagtcagaaaatctttgacttccgggagaagctggaatcggcgctgctggcggacgctggggaggatgctgttaccctgaccggcggggccaccggtctctactgcggctatgtggacttcatcgcctgggatttgagagccgtcctgaatgcggctcaggagttctttgacgaaaccgatctgccctgggcaagcttccatgtgttccgccgggatgtggggacagtgactctgaaggaaccggaaggggataagcctgaagatgacgggtttgatgacgaagaatccctggacaatctggagtacatcccctacaccccggagaatgcagaggcattttaccggcagttggaacggtggaacgacgaggacgaatacacccgctgcatcgcggcgctggggacgatccacaaggaccagtgggactatcgcgccgcctatgccatggcacgggcgctggaaaactacgccatcattggggaccatgaggagggtacccccaactacaagggggataaggcgctcctgcaggctattgagatgctggagtccgtccgggaggagggccaggacaaggcggagtggaatatgcggatggcctacggctatcagtatctccacggccaggaggaaaaagccattccctacgcccagcggtgggcggagctggacccggaggatgaggacgccccggcagtgatccgggagtgccggcaggagatccggaaccggcagcgcagccggaaaaagaaaaccaggtttgcgcccggcgacactccctttgaaggctttgattttacagacttttgggatgatgatgagtacgctctgaaagagtatgtcagtgagccaccctccgatgaactgatcgccagtgtggaggaggagttgggctacaagctgcctgcctcttatatctgcctgatgaaacagcacaacggcgggataccggccaatacctgctatcccagcgacgaaccaaccagttgggcggatgaccatatagccatcaccggcatctttggcattggccgggagaaggactattctctctgcggaaagctgggcagccggtttatgatcgacgagtgggaatatccggccatcggcatagccatctgcgactgtcccagtgcaggacacgatatgatctttctggactaccgggactgcggcccccaaggagagcctgcggtggtccatgtggatcaggagaacgactataaaatcacccgtcttgccgacagttttgaggagtttatctgcggtctggagaacgagtctgtctatgatatggatgaagatgatgacaacgaggatgatgacactgacgaagaagccgatcaggatagcagaggcgccttcgccggctttgtcctgatgtccaaaggaagctgggacaaggcccagttcattcaggatatgaaagcaaagtgggacatcaccgtggaggaggatgaggacgggggcaaccgcgacgacgctgtggtctttgaagtgggcggcatgatcgccgctgtaagcctgatgccctatcctatccctgacggcgaggccgaactgaacgcagaaaacaactatatgtggccggaggcggtcaaggccgccaaggagcactgcgcccatatcatggtggcggtcctgggcaaggaggaaaatctgctggagcgtggcaagttctacgccaagctggtggccgcctgttgccgccagaaatacgccgccggcgtctacaccagcggcgtggtgttcgagcctcggttctatgagggctttgccgatatgatgcaggaggatgaactgcccattttcaactggatctggttcggcctgtatcggaacgagggcggcatgagcgcctacacctatggtatggaggtgttcggcaaggacgaaatggaggtgctgaacaccggcgccgagccgggagaactgcgagacttcctggccagccttgtgtcctatgtgctggaaaatgatgtggaacttcacgacggggaaaccatcggcttttcggcagaagataagcacaccatcacccgcagcaagggcgtggctctgccggatcagatgaccttgaaaatctcctatgtgcctgccggggacgatccagagcaggatgatgacgacagcataggcatggacgatgcctcctggcacatggaaagcattgaggagaaagaactggaaatcgaccccatcaatgcctgcagccacatggcaatctacctgcgctggtgcatagagcatgacctgatggaagaaaacttcctgtcagagcatagcgaagttgtaaaacaggtcaaagccgatcctgccaacgtggatttgcgggcgttcatccgtgagaagctgttcggctgcttgtactccgccctgttcaatcaacaaggccgcgcctttgccgggtactactacggagagggcgacagcccttactttcccagtgatgtggatgactacgctctgcaatatttcggcccaaagcggtatcactccaatgaatttcagcaggaagcctatctgttcattccctttgacgaggactattatcaggccatggcaaaggtgattgataaacgttttgtcaactggcagggacagggctttgatgaggatactttggagccttccgatgtggctcaggctatcatggagtatctggactgcgagtgcacctatttcccttccatgaaggacgacgaccccatcatgtcggcgtacagctacgcccggcggctgggcgtgcgggagggctttattcccgtgcttgtcaagccggacgaaacgctgctggagtgcctggtaatgaacgccgacccggagaacgaggcggactgctatgaatttgacctcaaaactgtgacggggtaccggaagaagattctggatgctcccatcaaagacggaaaggctgtcttggagcaattggccggacaacgcagggaagaagccgaggatgacgatctggactgggcggaagaagtcctgggcgaaatggaaggcggctatgataactgccgtttctcctgttactgggattctgacactaacatgacttatccgcttattctggcgaaaattccggtgaagaatccgtgggatattttcgcatacctgccctttggcaactggaacgagtgtcccgacacaccggagctgatggcggcggcaaaatactggtttgagcagtatggcgcggtccctgcggctatgacccatgatgaattggaatttgaactcccggcccccatttccaaagagaaagccatggaggcagccacggagcagtatggtttttgcccggatattgttgaccaggagcaggatgatcccacagtgggtaacttggcggatgtcctgtggcagtccactgtctggtatttctggtgggattga

SEQ ID NO: 1807 - DNA, 7305 bp, Anaerotruncus colihominis
atgaacagcgagttatttccgatcatagaagaacgtgtgcgtgcagcggcacagacaaaaccatcgggtatccggagactgaaaaaagccgtgcgcagatggctgcgtgatctgcgcacagcatatgacagcctgcccgctgcgccggaagaagcctgggcgcgatggctgtccgataacttctatacattagagggacatgccaaacagattctgcgcgatctgcccggttttaaaggctgtggaacagcatgtatgcggctgtatgcagcagttgagcgcgtgtttatggatgggcgcgtggtgcccgatcaggcgcatgtggggcagacgcttctctttgccggcttgttgggtgagctgggagaacgtcaattcgattttttatacacggcgctgcgctgcgcgcttctacgtgcggcggcagacgcatgcgcagagcagacagcgaagcaggaacgggaacggttgatctcctatgcggttgtggaactgaaccgcatttgtgaacttgatttcgacgcgctggtcagcgaatgcagcgcggtcgaagcaattctggcaaaggacccgtccggcgtctatccgcgcatggcggagcagtcgcgcagccattaccgccatgttgccgcacgcattgccaaacggtgcggcatggcggagagcgcggtcgctcaggatgtgctcaactgcgccgagattgcaaaaggcgaacgtgaacgccatgttgggttctatcttttaaaccacgatccgcgttcgatccacgcgcgccgccgtgcaatcgcggcgctgacgctgacctggctggcgccggtgctgctgtgcgtgttgatctggggcgtctttcacagcctgacagcggcgcttgtatcctatctgcctctggtggaaattgtacgcgttatcacgtgtgggctggcggcgcggcacgcgtctccggcacatatcccgcggatggagcttcgcggcgatgcgccggagacaatcgtagctgtctccacacttttgccagctgcggcaaaggcggacgagctgcgggaacggctggaacagttatatttttcaaacagaggagatcatttaaaattttgtgtgcttgcagattttaaggaggaccgccggccttataacccgcaggacgaactgaatatggcggctgccaagcgtgtggtggagcagctcaatgaaaagtatggttcgcgatttgcgctgctggtacgccgccgcgttttcagcagtacgcagaacgcgtatatcggatgggaacgcaagcgcggtgcaatcatagagctgatccgcttcctgcgcggcggcgatcccgcgatcgcatgctttgccggcgatcgggagcaattatcacgggcgcggtatttgcttgcgcttgacgccgatacgcttctggcgtttgattcagccgaccgcttgctgtctgccgcggtccatcccttaaaccgtccggttattggaaagcacaatattgtaacagccggttacggaatattggtcccgcggattggcacggatttgaattctgcaaaggcagctgactttacacgaattatggccggggcaggcggcgtttccacatatgagcaggaatgcagcgatttttatcaggaccattttggagagtcgatttttacaggaaagggcctaatcgatattgaaacgtttcatacagtcgtcggccggcgttttccggaaaaccgggttctcagccacgatatactggagggcgcatacctgcgcgccgggctgctctctgatgtggaaatgaccgatggaatgcccgcaaacgcgctttcatggcttgcgcgcctgcatcgatggattcgcggcgactggcaaaacctatgcttttttggcagaacgattcagctcaatggatcgtcccggccaaatcccatcagcgcgctgtcacgttatcagcttttcgataatttacgtcgctcctttgtacccgtggcggcgcttatttgcgtgctggtttctgcctttacaggatggagggcggcaattttgctctgtctgcttgctttcctttcgacggcattggcgcctctgctcgccgcttttcgcgcgctgctttacggtgggcgattcgcattgtcgcgccgtttttttgcacgcacgttgccgcgtgtatttgagctttgcggccaggcgctcctgtcggttgtcatgacggcacagcaggctgttgttgcgtttgatgcgattgtacggacgctttggagaatatttgtatcccacaaaagattgctgcagtggacgaccgcggcacagtcggagacgcgcgataccggcttttttgcagtgctgaaaaaaagctggctttcagagctggtcgggctttgcctgttgatttttgcgccggcaagccacggtctggtaaaactttatgggcttctgtttctgctttacacgccggcggccgctgcgactgcacggccggctgtccagaggctgcaagcgcccgatcagtcaggccgggaacgccttttgtcgctgtgtgcgcagatgttccgttattacgaggattatgcggacaaacacaatcgttggctgccgccggataacgtgcagttttcaccggtggaagcggtggcgcggcggacctcgccgacaaacatcggcatgatgctgctctcctatctggcagcgcgcgactttcactttattgacagccgcggcctgtatgtacgcttaaatcatgtatttgacacaattgagacgcttcagacctggcacggaaacctgtataactggtattccaccgaggatctgcatgtgctgccggagccgtttgtctcggcggttgacagcggcaattacctgtgcgcgctcgtcgcgcttaaagaaggcgtgcgtgagtatgcggctcaggagccgggcctggaaaccatcgcagggcgtattgaagccattttgaaaaacaccgacttttctgttttttataacccgaagcgccgccttctgtccatcggcgcgggagccgacggcaggctggtttcgtcccattatgatttcctgatgagcgaggcgcgcacggcaagctattttgccgtggcgacccgtcaggcgcagtaccggcactggcgcgcgctcaaccgcaccatgtcgcgctgcgggtcctatgcgggtcccgtttcctggacagggaccatgtttgaatattttatgccgcatctgcttttacccatatatgaggattctctgcttgatgaatcgcttcattacgcgctttactgccagaaacgccgcgcgcgtcgcgcaggcgtcccctgggggatcagtgaaagcggttattttgcattcgacgaacagctcaattatcagtacaaggcccatggcgtccagacgctcggcgtcaagcagggactggaccgcgaatgcgtcgtggcgccatacgcgacctttttaacgctcccgtttgattttgatggcgctatgaaaaatcttgaggctctcgagtcgcttggactaacgggacgctatggcttttacgaggccgtggatttcacacctgggcgcgccgcgccgtccgacggcggttatgcggtggtgcgttcctatatggcgcatcatgtcggtatgagtatggtcgcctgcgcaaacgcgctgcttggcgggattatgcaaaaacggtttatgcgtgaccacgctatgcgcgcggcacgcgaatttctgcaggaacaaatttctaaggatacggtggtgtatgatcgtatgaaggatgagacagagctttgcagggccgaaacgcctgtccgcgctgtttcggcgcgcgacggcgtttcgccgcttgcgccgcgctgcgcgcttttggcttctggggaactgacgcatatcttttcggatacaggcacaagttggctgcgctttggcgattgcgacgcaacgcggcgtccgtccgacccgctgctgaacgggcagggggtgcttgcagcggtaaagctctgtggacagacgctcacagccgcagccgcgccgttttatcaaaacggggttgaacggcgcagcgaatttggccccgattttgtggcctatcacgccgatcagggtgatattgggctgacgcagcggttttcaattgatcggacggcgcctgttgaacgctgcgaactgattgtacgaaaccgcaccgcgctcaaggccgtcgcgcaggtgttgatctattttgagccggtgctcgcacgtgacagcgattatgcggcgcacccggctttttccaagctgtttgtaacaggggaacgcgatccggccgcagacgcggttgtgtttgtgcggcggcacagggaaggcggcgagggtccgtgcctctgcgcgggatttgccgggcgggaagcctttgaatgcgggctgcggcgcgaggatatgacgccgtatccggacgggcttgaaaacctgctgcaattcgacgcactgccttttaacggcggcggcgcgacgcccgatggctgctgcgcgctgcgcgcaacgatgacggttccggcacatggcgaacagcgcatcacgcttttgatctcatgtgcggctgcacgtgaggatgcgcttgacgccttggccggcgcacgcgaaaaaaagcgtgccgccgcgccggcgccgctggcggacgacacgatggaagccagactggccgcgcggcttttgccgtgtctgttgctgcgtgcgtccggcggggacagccgtgcgcttttggaaaacacgcgcggacaggacgcgctgtggtcgatgggaatttcaggcgaccgcccgattgtcctgttcgattggaacgcataccccgatggcgcgcgtctagccgcctatacacgcctgtggaccttgatgcgcatgtatcggcttgatttcgacttgtgtgtgttgggcactcccgctgccaagacaccggatggcgtgcatgtactcctgccggaacggttcgatccgtccgcggttcttctgctgcgtgctgcggcatgccatatcgcaggccaaccagagccgccggcgccgcctgaatgggagcctgcgccggttctgcatacggatcccgcccccattttgcaggcaaaggaacgccttgacgtggtcggcggcgcatatgtaaacgggcgcttttatgtatcgcgtgtgacgccgctgccgttttcgcatattctcgcaaacagaacgttcggatgcctgctcaacgatgcgtcgctcggaaatacctggtggctcaacgcgcatgagtgcaggttaacgccgtggaaaaacgacattgccacaggctgcgacggagaaaagctttggctgtcggccagtggggcgctgtacgacctgatccgtggagcacgcgcctctttttcaccggaggacgctttatatgaagggtcagccggcaaaattttaacggcggtacgtgtctttgtaccggcgcaggggaatgctaaggtgattgatgtatcgcttgaaaatcaaacggacgaggaggcggaggttatctgtgcgtatggtttggaaccggtacttggcgtaacgcgcctgaacgcaaaatacacccagtttgatcaggaacagggctgcctgctgatgcataatccctatcacatggcgctgccgtgccatgcggctgtgtacgcgccgcacgaatatccgagctatacgaccgaccgcgcggcgtttttggcgggagactggtccgctcgcgaactgctgcccaataacgacccgatcgccggactgattatccgcaagaagctgccggcgcgccggcgcgccgatatccgcctgatcctggccgccggcgcaacgcgtgcagaagcggtcgccgaggcgctgcgccagcagtctgcgccggacgtcgggatggaacgaccggttgaaattgcgacgccctgcgcgccgcttgaccggtttatcaacacgttcgcggtgcaccagatccgttccggccggctgtttgggagatgcgcgttttatcagtgttccggcgcatacggcttccgcgaccagttacaggacgcgtgcgcgctgcgtttgacggaaccggcgcttttgcgggagcagattttgcgatgctgcgccgtacaatttgcggaaggagacgtgctgcactggtggcatccgctcccgacagagacacgcggtgtccgcacgcgtttttccgacgatctggtctggctgccgtatgcggtctgcgcgtatgtcgaggccaccggggacaagacgcttcttgacgagcaggttccattctgtacaggcggcgcgcttgcgtccggagagcaggagcagtatatgcaggtacaagcttcagagacacgcgcgccggtctttgaacattgtgtccgcgcgctggaaaaggcatataacctcggcgaccgcggcatcccaaagatcggctgcggcgactggaacgacggcttttccaaggtcggcgcgcgcggcgagggacaaagcgtctggcttgcgatgtttttatccattgtctgcgaccgtttcgcggcgctgtgtgacagccgcgacgcgcagcgggccgatgccctgcgcgcgcacgccgcgctgctgcgccgcaacgtcgacgtatcctgctgggacgggcagtggtatctgcgcgccttttatgacgacggcgcgccgctcggaggccatggaaacgacgaatgctcgatcgacctgctggcgcagagcttcgcagtttttgcagggatgccggaccaggcgcgcgtcagcagcgcgcttgatgcggcccttgcccatctggtggacgaccgctgtggaatcatccgcctgtttgatccgcctttcgccgacacaaaacagaatccgggatatatcaaggcgtatccgcgcggcatccgtgagaacggcggccagtatacgcatgcttccgtctggttcgcacaggcgatgcttgagtcaggacgaatccgcgatggatggaggctgatcgatctgctcaatccaacggcgcgctgcacggacgctgcacgcgcgcaggcatttaagacagagccgtattatatgcctgccgatatctatacaaataaagacgcctacggtcatggaggctggagtatttacacgggcgcggccgcatggtatttgcggaccgtcctggaaacgctgcttggactgcgccccaaagacggcgctctgacgtttgagccgcatgtgccggacgactggacacattttaccgttaagctgcggcgtgaaaacgcggttttatctattgaagtgaaccggaccggtatgcgttcgcttacagtggacggagcgccggcgcagagcgcgccgctcgacggaagggatcatacgattttgttaacgatctga

SEQ ID NO: 1808 - DNA, 2664 bp, Anaerotruncus colihominis
atggatgatcacagacggacgccttggcattgtcagccagtacaggaagtatacgaagctttgcgaacctccagcgaggggctcagcgatgccgaggctgccgaacggctaaaaaaagatgggcacaatgagctgcgctcgaaaccgcccaaaaccattttgcagatgctttattcacagcttatcgatccgatggtgcttattctcgtcggcgcagccgtatgctccgctgtgctgcgggaatggacggaagcgggcgtcatctttgcgattgtggcgctcaatgcagtcatcggtattgtgcaggagaaaaaggcccagtcctcattggaggcgctgcgcaatatgagcgcacccaccgcccgcgtgctgcggcagggcgacgaaagcataatccccgccagcgaggtggttgccggcgatatcgtatttctaagcgatggggatatggtgcccgccgacatgcgtctgattgactcggcgaacttaaaggtgcaggaagcctccctgaccggagaatccgtcccctctgaaaaggacgccgacgatttgctcccgctggattgcccgttgggcgaccggagcaatatggtgtatacgtcctctattgtcacctacggccgtgcgaccggcattgtggtggcaaccggcatgaatacgcaggtcggcggcattgctgaaatgctggaggagcaggatgagcttgacacaccgcttaaacgcaagctgaatgcagttggtaaaacgctcaccattgtcggtctgattgtctgtgtaatgatctttttgatcggcgcgctctatcagcgtccactgatcccgcagtttctcgttgctatttccctggcaatttccatcattccggaaggtctgccagctacggcgaccattgtaatggccctgggcgtgcagcgcatggctaaacgcaatgcgcttgtacgcaatttgcccgctgtggaaacgcttggcagcgccactgtcatttgcagcgataagacagggacgctgacgctcaatcagatgactgtgactcacatcgcggtaaacggcgattttgaagcgggcgcgaccacccccatcgccgaagccaccggacagcaccccattgtttataaggagcttgtttacgcggcggcgctgtgcaatgatgcgagcgtcgacccggatcacgcaggcgcaatcatcggcgatccgacagagggcgcgctgattcacatggctcaggctttcggagtcgatcatgaggccctggaggacacatatccacgccggtttgagcagccgttcgattccgaccgcaaacgtatgacgacagtacatgtgatctctggaaactggatttcctatacaaaaggcgccgtagatgaaatgctgccgctgtgcacccatatattgacggctgatggagtccgccccatcacagaaggcgaccgtgcaaacattctgcgcctttgcctgtccatgtcggagcaggctttgcgcgtgctgggctttgccacgcgtaccctgaccggcgaacagattccggaggaggacggcgacaatgtggaatacgatatgaccttcctcggagtaacgggcatgatcgatccgcccaggaaagaggttgctgattctgtacgcacatgccgccaggccggtatccgcacgatcatgatcaccggcgatcacaaggttactgcgcttgccattgctcgggaattggacatttaccggcctggagacacggtgatctccggcgatgagctggatgaactggaggacgcagctttggacgcggctgtcaaaaacgcgactgtattcgcgcgcgtgtcccctgccgacaagctgcggatcatccaaagcctgcggcgcaccggcgaggtggcggccatgaccggcgacggcgtgaatgactcccctgcgctcaaggccgcggacatcggcgtagccatggggatcaccggcacggacgtggcaaaggacgccgccgatatgatcttactggacgacagctttacgacgatcgcctatgccatcaaggagggccggcgagtataccgcaacatccaaaaggttatccaatttttgctggcaggcaacatcgcggagatcacgaccctgtttgcagcgaccatattcaactgggaagcgcctctgcttgccgtccatattctatgggtcaaccttgctacggcgaccctgcctgcattggcgctcggcgtcgaccctgcaagtaaaaacatcatgaagcatccgccggtgaaatccggtacgctgtttgaaaaggatctggtatgccgtgtgatcacgcagggtattttcgtggcggccatgacaacgctcgcctattggatcggcgcgcgcatggacaatccaaccacaggccagacgatggccttctgcgttttggcgttctctcaaatgctgcgcgcttttaatcagcggtccaatacggaaccgatttgggtccgcgccgagggtatcaacccgtggctggttctttcctttttagtttctgcggctttgatggcctgtattttgctgttgccgtccccgcaaagcgccttcaagctgactggcttaagcagcgtccaatggatagctgtgctcatgctgtctctctcctctgttcttcagatagaggtcgtcaaatggtttaagcggcaaaagcagcatggctga

SEQ ID NO: 1809 - DNA, 3084 bp, Anaerotruncus colihominis
atgacgcttccaaaactgtctgtcaagaggcccgttgcggtccttatgtgtgtgctgatgctggtggtattcggcatctcctccatctttggtatggagatggagtccacccctgagatgtccatgccggtgtttatggttatgacgcgttacgagggagcctccccggaggaggttgacaaccttgtcaccgatgttgtggaatcggccctatcctcgatcagcgacgttaaaactatgacgtcgcgttcctcagaaggctcgtccatgacgaccctggaatttgattacaacaccgatatggatgaaaaatacgacgaaatcaatgaagcgttgacgcgcctgcgtttgccggattccgccgatgatccgacgattatggaaatgagcatggattcttcatcgatcatggatctttccatccgtgccaacgccgacgacaatatttattcctatatcgaaaataccgttgtcccggaacttgaaaaaatctccggcgtctcatcggtcgatatgcgcggcggtacgcgcgaatatgtcaaggttgaattgcgcgaggaggagatggagcaatacggtctttcaatgaccgatatctccagcgccattgcctcggccgacttcacaacgaccgcgggggaaatcaaccgcggcaacatatccctgacgctcgagggcggcgtcagctacgacacctatgaaagcctggaaaccatcccgatttctctggcctccggcgatattatccatatctccgatgtggcgaccgtcagtatggccgaggagcagatgaacaatatcagccgttataacggcatggataacatcagcctgtccatttcgaagaaccaaagcgccaacacaattgagatctgcaatgagatttccgagaaagtagacgaattgaacgggcaggggcttggtcttgcaatcgaaatcacaaacaacagcggcgaaacgatctatgaaaacatcatgaacgtcgtttccaccttgcttcagggtcttgtgctttccatgctcgtcctggtcgtattcctgggcgactggcgcgccgcgctgatcgttgccacctcaatgcccttgtctgttttcgcggcgcttgtgctgatggccgcgtttggcatgaccatcaacattctctcgctcggcggcctggtagtcggcatcggaatgatggtcgacaactctatcgttgtcatcgacagctgctttaaaatgcaggatggtatacgcacctatgacgacgccgccatcgccggagcgaacctcgtcaatggggccgtcatcgcgtcaacgatcacaaccatcgtcgttttcctgccgattgctttgatggacggcatgtccggtcagctctttaaggacgtcggctttacgatcgtcttttcgctgacagcctcgctgatttctgcgctgacgctcgttcccctgctttttgcaaagttccggcccgtggaaaaacaaacttcggctgtcaaccgcggactgcacaagctcgaacgcctgtacggcgccttgcttgacaaggctctctgtcataagctgattgttgtggccattgccattgtcatgcttgcaggcacgttcgttatgttcactcagatcgattccgagctgatgccgatgtccgacgaaggctccatcagcatttctgtcacgacaaaaaccggtcttaatattgatgaaacggatcagatcatgacacagctcgaggcgctggtggccgaacagcccgacgtagaaagctattccatgcgcggcggcggcggttccgcaagcattaccgttacgctcaaagacgaccgttccatgcagacggacgaattcatcgctttgatgcgtcaggaaacagcttatgttgaaaatgccagcgttgaagtggaggaacgcagcagtatgtcgtttggcagccggggtgtacagatcaatctgtccggcagcaacctcgatgtgcttgaacaaacggccaacgaggtcaaagaggttatgcaggaatttgacggtattgattccgtttcaacaagcctgtccgacggcgacccccgtgctcaaatcgttgtggactctgtgcaggcggccgcaatcggtaccaccccatcggcggtgctgtctaccgttcggaacatgatttccggtattgaggcgactacgcttcaggagagcgatcaggaatattccgtcaaggtcatgtatccggaagaccgcttctatgatgtcagcgatctttccggcctgatgatctccacgcgttccggcggccaggttccgctgaccgatgtagcgaccatcgtatacaataacagcccctctcagattcagcgcgaggacggcgattaccaggtttccattacaggccagaccgcgattggccagtcggacagcagtctttccggccagattctcgcgcgggttttacagatgaatctgcccgaaggagtcacggtcgaggaaggcggcagcatgcgcaccatgaacgaggaattcaacgctatttacggcgcgctggccacagcaattttcctggtgtttgtcgttatggccatccagtttgaatcgctgcgcttctcccttgtcgtcatgttctctgtgccgtttgccatgacaggcgcatttctggcgctgctgctgacagacatgtccatcagcatgacttccctgatcggactgattatgctcgtcggcatcgtcgtcaacaacgcaatcgtcctggttgattataccaatattctgcggcgtgaacaggggctaaccgcccatgacgcgctcgtcaattccgggcgttcacgtctgcgcccgatcctgatgacaacgctgacaacggtcctcggcctgctgccttcggcctttggcttcggcggcaatgtcgaaatgatgcagtcgatgtccgtcgttgtgatcggcggtctgacgctttcgacgctcgtcacattgattctcgtcccgaccgtctatcttctgtttgacggcgaggaccgccgcaaaaagggacacaaaaccggcaagcgttctctgctgcgccgcaaccggcgcgaacagccgcaggtatccgatgcagcgccggttccgcctgaattcttttga

SEQ ID NO: 1810 - DNA, 4338 bp, Anaerotruncus colihominis
ttggcgtccctgatcgaactgttcggcgaatacatagagctgccgcccggtgcgcttgcgcgcgggacggtacttggcatgcagattgaccagcagaagcggtcgatgtgcgtttcgctcggtttggacgagctgacgccgtatgctgcgctttctgagcttggccggcgtctggcggcggcgttctccttaaacgatgctgtggtccatccgcgctatgacggcggtatgctgtcaagcgagcatctgccggaattgattgcgcgtctgggcagcgaaggcgtgccggtcaacggtttttttaccggatgccgctgtgatttaattgatgaaacgctgcgcatctatctgacgcatggcgggcaggaattcctcgaaagcatccattgcccgcaaaagctttccgcggtcatacgtgaggaattcgggcgcgaggtgcggattgtattcgacggcgtgctcgaggtcgcgcctgacagcgcgctgtatcaggaaacagttgaaaaggtgcgacccaagccgatcaggtatacgccgcccacgccgcagcaggcggaaaagaagccggagaacggtgcagtcattccggcggcggcgcgcctttccttcgatgcgcacgatttgccgtttgagcctggttccatggttacgctttacggaaatcccccgaagggccgccccatagagatggcgcaggtaaatattgaaagcggcaatgtgacagtatggggcgatgtattcaaaattgaccgccgtaccagccgcgatgaaaagacgctcattttgtcgatttattttactgattacaccggctcttattgtgcgaaggtgatcggccggtttgacaagaagatgaaggcgctcgacgagctgcacgagggcgatacggtcgctatgcacggcctgattgaatatgaccggtttgaccgtgaaaatgtgatgcggcccgacagtatcgcgactgtaaagaaaatcccacggcgcgatctatgcgaggaaaagcgcgtcgagctgcacatgcattcgaacatgtcggcgatggatggcataacacccgcggccaaactgattaaacgtgcctacgaatttgggcacaaggcggtcgcgatcaccgatcatggcgtggtgcaggcatttccggactgcatgaacgccgttgccaaaatccgcaagagcggcggcgatatcaaagtgatctacggcgtcgaagcctatttcgtcgacgacgtggttcaggctgtcagcggtaatgcgcacggcaggtttgacagcgagatgattgtatttgacctggagacgaccggcctttccgctgcgactgaacgcatcacggagatcggcgcggtgaaactgcgcaacggtgagatcgtcgaccgctttaacacatttgtaaacccggagcgttcgatcccgccgaagattacagagctgaccggcatcaccgacgacgatgtgcgcggcgcgccgctcgaaggggaggcgctgcgccagttctatgcattctgtgggggcagcagcgcggtgctgatcgcacataacgcgccgtttgacacaagctttctgcggcagtgcgcccggcgctgcggcatggaatacaattttaccgcgattgatacagtcgtgctgtcgcgttccctgtttccggagctgaaaaagcataagctcgatatcgttgcaaagcatctcgggcttggcgagttcaatcaccaccgtgcatgtgacgacgctgaaatgctcgccaggatctacatacgtatgatggaactgatgcagtcggagcgcgcatgcagcgatattggacaaatcaatacatcgcttgctgcggtcgatgtcaaaaaatcgccgacgtatcatcagattatcctggtcaaaaatctgacagggttaaaaaacctttaccgtctgatttcgatttcccatctggattactatgccaaacgtccgcgtatccccaaaagcaagctgattgaacacagagagggccttttgatcggaagcgcctgtgaagccggacagctttaccgtgcgatcgtggaggggaaaagctggggcgacctgtgcgatatcgcgcgtttttacgattatctggaaatccaaccggtcgcaaacaacgaatatatggtgcgcagcaatatggttgcggacgagcaggccatccgggagtttaacgaaacggtcgtgcggcttggagagcggctgaacatcccggttgtcgcaacctgcgacgtccacttcatggacccgggcgacgcaaaattccgagcaatcctgatggcgggcatgggctttgccgacgccgaccagcaggcgccgctgtatttccgcacgacagacgagatgctcaaggaatttgaataccttggcgcgcagaaggcgcatgaagttgtcatagagaatccaaacctgattgcggatatggtggaaaatatcaagccgatcccggatgggacgtttacgccgaccatcccaggctccgacgaggatttgcagcgcatcacgcgcgccaaggctatggagctttacggttatcaggggcaggtgcctgaacttgtgtccaagcggttggagcgcgagcttggctcgatcatcaagcatggatttgccgtgctttacatgatcgcgcagaagctggtggccaaaagcgaggaagggggctatcatgtcggctcgcgcggttcggtcggttcgtcgtttgtcgcgacaatggccggcatttccgaggtcaatccgctgcctccgcactactactgcccggactgccattacagcgaattcatcactgacggttcggtcggctccggatttgacctgccggaaaaagcctgcccgatgtgcggcgccacctataagcaggacgggcatgatatcccgtttgaaacgttcctcggctttgacggcgataaggcgcccgatatcgacctgaacttttccggcgaatatcaggcgcagatccataaatatacggaggaattgttcggcccaacgcacgtgttcaaggccggtaccatttcgaccgttgcggaaaaaacagcctacggctttgtgaaaaagtatgcgcaggagcgcgggctgatcatgacgcgcgcagaggaggagcgtctcgcgattggatgcaccggcgtcaagcgcacgactggccagcatccgggcggtatggttgtagtgccgtccgaccatgaggtttttgatttttccgcggtgcagcgcccggcggacgatccaaattcagatatcacgacgacgcactttgacttccattctctgcacgatacgatcctcaagctggacgagcttggacacgatgttccgacgatgtataaatatctcaaggacatgaccggcatcgacgccaatgacgttcccatgaacgaccagaaggttatgagcttgttcctctcgccggaggcgcttggcgtcacggaagaggagatcgactgcaataccggtacgctcggcatcccggaattcggtacaaattttgtccgcggcatgctgattgaagcgcagccgaaaaatttttcagacctgctgcaaatttccggcctgtcgcacgggacggacgtctggctcggaaacgcccaggagctgattaaaaataaggtttgtacgatttcaaacgtcatcggtacgcgcgacagcatcatgacgtatctgctgcacaaggggctggagccgaagatggcgtttaagatcatggagattacccgtaagggcaacgcgccgaagctgcttacagaggaacacatgaccgccatgagggaacacggcgtaccgcagtggtatatcgatagctgtctgaaaattaagtacatgttcccgaaagcacacgctgcggcgtatgatattgcttcaatccgactgtgttggttcaaggtctatcaccctctggcattctacgcggttatctttacggtgcgcggcggcgactttgacgcggaagccgccgtgcagggcaaatcggccacgaaacgcaagatacaaaacctgctccagatgggcaacgagcgaacggccaaggacgagggtgttttgaccatgctccagatcattcacgaatgccaggcgcggggctattcctttttaccggtcgatctgtataaatcgcattacagcatttatgaggtggaggacggcaagatccgcctgccgtttatggcgctcaagggcgtgggggaggcggccgccaggagtctgtgggagacggccaaaaccgagcagtttatctcagcggacgatatttcaaaccgcgcgggtgtttccaagtcagtcattgaaatgctgcgtggagcaggcgcgctcggcgatttgccggaaacatcgcaggtgtcgtttttttaa

SEQ ID NO: 1811 - DNA, 2796 bp, Anaerotruncus colihominis
atgaagcgtgtcctttcattgatacttgcctgtattttgctggcgggctgcatctcggcggtggtgctcgcggagggtgcagccgatccggttctcgacaccggcgtcgttgtcaccgtttcagttacaggcagcggtgaaatcaaactgagcgagagggatgactcgtctaaattttatccggttgtcaatggccaggcggctgtccccgcaaataccgcaatcaaaatcgaagctgttcccggcgagggccagcggcttttaagccttgccgcaaagggcatcgcattgacaccgccgtatacagtatctttccagtctgcggacatggacaaaaccattgccgccgtctttgaaccgatgcagtattctgttacatatactgctcccaccggtggtacgctgtccgtcacgaacagcggccagcccgtcgcgagcggtacaaagcttgattggggcacagtgctgactgtcgcggcgacgcctgacgagggccatgcactcaatacgctgacggccggcggcacgccggtcgcaagcggcgcgacttttacgctcaagcaggatacgacggtcgcggcgtcctttaaggcgctccagcattccgtcacttatgacgcgcccgttaacggaacactgtccgtcacaaacggcggccagcccgtcgcgagcggtacaaagctcgactggggcacggagctggtcgttacagcgacgcccagcgacggttatgttctcgatacattgacggccggcggcacgccgattgcaagcggcgcgccctatacgctcaagggtgatattctctttgcagcagctttcaagaccgcggacagcgtaccggttgagatccccgacacacagccagcggatggcaagcttacaatttattacaatggtcagccattgacggcagatacgaccctgcctgttggagcgcagctcgaattccggatcgtccccaatgatggcaaggagcttgtaacgcttactgtcaacggcgaaatcatctatgatctcaacagtccggcccgtgcggccgcccataccggcgatacaatcacggtcccctataccgtcaaggaagcggtcacaagcgttgcagccaccttccagacggctgcgaagcgtgatgtcaccgtcacgcttcccacgcttgttaccgagcagggaacgctgactatacgcaacctgacgcagaacaaggttgtcgcggccggaaccggcaccgttcagacaggcgaccggctgcaatttgagttaactccgaaaagcggttatcagatcaccgctttcaatgtaaccggggtcaacgagaatatgcccgctctgccaagtcccggacgcgcgctgacatttgccgccgccgtcaaaagcgacgcgacggctttgacagtcacagcctcgcttggggcctatgcgccgaacggtgacaagggcagcgtcgccatgccgaccggcgtgtttgacgatgacggcgacacgctcgaggataaggacggcgacgccttcgatatcgattctattgcaggcgacgggcgtattacgcttgacggtgtgcgtccaaaccgcaccttctatatccagcttggagacgacagattcaacccgacaaccatcctcgacgacggctgcatggcaactgcaagccaactggctgacgacagtctgttccgaatttcaattgacaaggagggcgacggcaaatctctgatccgttccatcacacaggtcaacgaaaaacggttaggcggttcgtccacacgcggcagctatctcaaggttgtactcaaagattcgacctcaaccgatgaaaaaaaagcgactgcaactgtcacctttaaggcgcgcaacaccctgaaaaccgctgacggcgacgagggtgactggcattccggcgattgtgcgacgcttgatatcactatgtggatcgccaacaccaaaacttccggttccgatcacaacattaatacaggcgataacgtctaccttgatcccgacgataacgactggaacgtttatgtatggggtgatgaccgcgcggcgcttgaattttatgcttctgacgacgccgacagcttctatgcgcgcctgtccacaaaggccgatgtcgatatctacagcgagtatggtgatccggtggatgcaaacctctggttttacgactttgtcggccatcccgaggttccctcctcttcccgtgcatatctgacgcttggcatcccatgggatgaggatgatgattacaccccctatcccaatgactgttatatctatgaggtcgattcgcgcggcaatctgaccgatgtcacaagtagtttctcttatagccgcagcgagcgggaaattcctggatggaccaccagaactcgcatcctgggtacatatattgtttcagacacggagttggatttggagcaagattacgacatcgatctcgacgataacgccaccgactcctatgaggagcagattaaagtgaatccttcaaccggcggcggcaacagcacgccgccggtcacacagacaatcctgccgccgcccacgaccagcggctcagatgggatttcctcggagcctgccgggagcgaacctgcggaatcttccgagcctgagcgcgaaacagcacagaccggacagatcgatgtgactgagccgacggttccacaggttacacagcccgcctccaaccagcgccgctccttcccattgttcggtgtgttagccgcggcggttgtcctcgcgtgtgcaggtggagccgcctatcttgtatatctgaaaatgcacgatgtctga

SEQ ID NO: 1812 - DNA, 2181 bp, Anaerotruncus colihominis
atgggcctgtttgatgatcaattaaaaacgcgtctggaacaggaccgcgaatcctttgcggacgcgcttgaggcgcttggagagtctgtgacgggaaaagcagcagttacaggcaaaaatgggagcttggaggatgctgtgcacgaaatcctgacttggtttggagcgaaagcgccggagccgccgggcctgatggatgattttaacgaccggctcgattatatgctcaacccaactggaatccggcgccggacagtgaagctggatggaacatggtggagaaaggcggccggcccgatgctcgcctacacggcagaaggcagcgcggtggcgcttttgccgcgcaggtttggcggatatgcgtggcgtgaccctgcaaacaggcggacagtgcgcgccagtgtgaaaaccactgggatactgactggagaagctgtctgcttttaccggcctttaccgttgcaggcgcttaccctgcgggatttatttctctttgcggttcaatcggttgacagatgggatctaacgctgtttttattggctggtctgctggcgagcctgtttgggacggcggtcccgtttgtgacgcagatcctttttgcaacagtgatcccgatgggcggtatggagaatcttgcgcctgttgggatgttggcagttggagcgctgttttcactggctttggttggcctgacgaaatcgctggctgtcgaccgtatcgcgcagaaggtgcggctggtagtggaaaatgcggccatgagcaggttgttaagcttgcccgcgcagtttttccggactcacaatgcaggtgaactgcaaaaccgtgtggatgcgttgacgcaaatgtgcgcgttgctgggcgacacggtgctgacaggcgtcataaacggcgttttttccatcgtgtatctgtttttgatccgtgcgctggcccctgcgttgttcggtccgacaaccgttattctattggcgcagcttacggttatgattgccggcgtactggcaaaagctcatgtggcgcgtaagcgcctgcatattgcggcggatttgaacggattggtgttccggttgttttcgggtattcagaaaattaaactggccggggcggagcagcgcgccttttcaaaatgggcaaggtgttatgcagagaatgcggcgctgctttacaatccgccgcttctgctcaggatacagccagttttatcggcgctgattgccttgggaggatctatcctgctttattcctcggctgccaaatccggaatgcagacagccgattatatggcgttcgcatccgcatacggcttggtgaatggagccatgttgtcgttggcttcgatgacagagggcctggcggcgctgaggccgctggctgaactggccgagccgattatgaaggctgtaccggaaaccggcggcaataaaaaacagatccacagaatgagcggcggtgtggagctggcgaacctgtcgtttcgttatgcacacgacgcgccctggattcttgaccatatcaatttaaaaatccgtcctggccagtatgtggcgattgtgggcaaaaccggctgtggcaaaagcacgctgatgcgcctgctgctcggctttgaaacgcctgtctcaggcgcggtctattacgacaaccgcgacctgcaaacgctggatttgcctgctctgcggcgcaatatcggcgttgtgctccaacagagccgtctgtttgccggcgatatctattctaatatcgccatttccgccccgtggcttaccatggacgaggcgtgggaggcggcaaagctggccggcatggacgaggatatcaaaaaaatgccgatggggatgtatacgctcatcggcgaaggcggcggcgcactttccggcgggcagcggcaaaggctgatgatcgcacgggcgatcgcttcaaagcccaaaattttaatgtttgatgaagcaacctccgcgttggataatatcacacagcggatagtatccgattcgctcggtcaactgagatgcacccgcattgtgatagcccaccgtctttccacgatccgccaatgcgaccgcatcctggtgcttgacgggggaaagattgtggaggacggcgcttatgacgagttgatcaccgccaaaggcctttttgcggagctggtcaggcgccagacgcttgatatggcgccgctgtaa

SEQ ID NO: 1813 - DNA, 3756 bp, Anaerotruncus colihominis
atggtgaacgtgaagccggtaacgcagggaaagacaacgcgtatgagtttttcccacatcgatgaggtcctgcagatgcccaacctcattgaggtgcagaagaattcctaccagtggttccttgacgaagggcttaaagaggtgttcaaggacgtatcgccgattaccgattatcaggacaacctggtgctcgatttcattgattatcaccttgacgacaagccgaaatacaccattgaggaatgcaaggaacgcgatgcgacctacgccgctccgctgcgcgtgcgtgccagcctgctcaacaaggagacgggcgaggtaaaagagcaggatattttcatgggggattttcctctgatgacggacagcggcacctttatcatcaacggtgcggagcgcgtcattgtttcgcagcttgtgcgctctccgggcgtctattatggatcgtcccacgacaagagcggcaaggagctttacaccacgacggtcatccccaaccgcggcgcatggctggaatatgagacggattcaaacgatgtattttatgtccgcatcgataaaaaccgcaagctgccggtgacgacctttgtgcgcgcgctcgggtttagttccaacgaatcgatcatcgactttttcggcgacgacgagcgcatcatggccacgctggaaaaggacggcacggccaatacggaggaggcgctgctcgaggtctaccgcaagctgcgccccggtgagccgccgacggtcgattccgcgcagagccacattgattcgctgtttttcgatccgcgccgttacgatctgtccaaggtcggacgttataaatacaataagaagctggccatcacgccgcgtattctcgggcgcaccacgtcgcgtcccgtcgccgatccgctgacgggcgagctgctcgccggcgccgataccgttttgacgcgtgaattggccgaacgcatcggcagggccggcgtcgacacggtttatatcaggatcggggacgaccgcgagatgcgcgtgctttccaacggcatggttgatatcaaggactttgtcggttttgactgcgccccgctcggcattaacgaaaaggtccgcttcgctgtcctgcgcgaaattcttgacgcctgcgatggcgaggacgcgctgcgcgaggccatcgcggcccgccgcgacgagctgatccccaagcatatcatcaaggacgatatcttctcgtcgatcaactacctgtgcggacttggccatggcatcggcactgtcgacgacatcgaccatctgggcaaccgccgcatccgttccgtcggcgagctgcttcagaaccagttccgcatcggcttttcgcgcatggagcgcgtgatccgcgaacgtatggcgacgcaggcgcaggacatggacgttgtgacgccgcaggcgctcatcaacatccgtccggtcgttgcgtcgatcaaggagtttttcggttcctctccgctgtcgcagttcatggatcagaccaacccgctggccgaactgacgcataagcgccgtctttccgcgctcggaccgggcggcctttcgcgtgaccgcgcgggcttcgaggttcgcgacgtgcattacagccattatggacgtatgtgcccgatcgagacgccggaaggtccgaatatcggcctgatctcgtatctggcgacgtttgcaaagatcaatgaatacggttttgtcgaggcgccgtaccgccgtgttgacaaggcgacgggcgttgtcctcgacgaggtcgagtatatgacggccgatatcgaggatatgtatatcgtggcgcaggccaacgagccgctgacggaggacggcaaatttgccaatgaaaaggtcagcgtccgttaccgcgacgcggtaatggtctgtgaacgcgaaaaggtcgactatatggacgtttcgccgaagatggttgtatctgtcgcgacggcgatgattccgtttttggagaacgacgacgccaaccgcgcgctgatgggcgcgaacatgcagcgccaggcggtgccgctgcttgtgccggaggcgccgattgtggcgaccggcatggagtataaatcagcggtcgactccggcgttgcggttgtttccaagcacgcgggcgtcgtggagtccgtctcggccaacgagattgtgatccgcgacagccgcggtgaaagtcattcataccacctgatcaagtttatgcgctccaaccagggaacctgcatcaatcagcgcccaattgtcaaaaagggcgaggaaatttccgtcgggcaggtgatcgccgacggcccgtcgacggcgggcggcgagatcagccttgggcgcaacatgctcgtcggcttcatgacatgggagggctacaactacgaggacgccgttttgatcaacgagcgccttgtaaaagatgatatttatacctcgatccatatcgaggaatacgaaattgaatcgcgcgacacaaagcttgggccggaggagatcacacgcgatatccccaacgtcggcgacgacgcgctgcgcgagcttgacgaacgcggtatcatccgcgtcggcgcggaggtgcgcgccggcgatatcctcgtcggaaaggtcacgccgaagggcgagacggaactgaacgccgaggagcgcctgctgcgcgccatcttcggcgagaaggcgcgcgaggtgcgcgacacctcgctgcgcgtgccgcacggcgaatatggaatcatcgtcgatgtaaaggtctttacgcgtgaaaactgcgacgagctttcgccgggcgtcaatatggttgtgcgctgttacattgcgcagaagcgcaaaatcagcgtcggcgacaagatggccggccgccatggcaacaagggcgtcgtctcgcgcgtgctgccgcaggaggatatgccgtatctgcccgacggccgtccgctcgatatcgtgctcaatcccctgggcgttccgtcgcgtatgaacatcggacaggtgcttgaggtccacctcgggcgcgcggcggcggagcttggctggaaggtcatgacgccggtctttgacggcgcggacgagacagatatcgccgactgcttggaacaggcgggcctttcccgcgacggcaagacgtggctgcacgacggccgtaccggcgagctctttgacaatccggttacggttggctatatgtattatctcaaactgcatcacctggtcgacgataagatccacgcgcgttcgacaggcccgtattcgcttgttacgcagcagccgctcggcggtaaggcgcagttcggcggccagcgtttcggtgagatggaggtctgggcgctcgaagcgtatggagcggcctatacgcttcaggagattctgacggtcaagtctgacgatgttgtcggacgcgtcaagacgtttgaatcgatcgtcaagggcaaaaacgtaccgcagccgggcatccctgaatcgtttaaggtcttgatcaaggagcttcaatcactcgggcttgatatgcgcgtgctagacaaggacaacaatgagatcgatctcaagcagacctttgacgacgacgacaatatggggttgaccccagttgacgatgcgctgatggacggcgtcgaagtcccgtccgagtttgaggatggctttgatatcgagcatcccgatccggacgccgacgccgacgcggatatcgatctgctcgacgtcgacctgacggacgatgacattgaggaaagcttcgacccaattgaggagcttggccttgacgggatcgccaatgacgacagcttctaa

SEQ ID NO: 1814 - DNA, 2637 bp, Anaerotruncus colihominis
atgaagaaagtgctagcatccatccttgcgttgtgtatggttttcggaacagctatcacagcggcggcggacgatgcggcggccgacaacataaacaacgatgttgtttatgaagttgtaaccgttgatgtcgaagacctgatggtcgagatcgcccaacggcccgcgatgtacgcggcgaccggtaacttctacggcaataagctcactgggaacgccaagacgatctataatgatatgctcagttattttgagaatatcgacaatggcaccggcgattgtgtcagtaaatatactgtgaatggtacagccgccgaggttcaagaggctcttgcagcgaacctgatggaccacactgaactgcttaactggtttggaaaaggagcaggcaacaatatttcctatatttctggcggcggaatctgctatacctatttcccggttattgaggactatcgtgtccccggttcggaaaaaaaggatacatataatggactgtcgggttcctattcctattggaagattgactccaataagggcggagatcgcgccagcgcacttgcaaaagctgccgagattgtggcgaatgccagtggaagcgattttcagaaggtccgttatttcaacgaagccatctgcaatctgaccacctatgatttccccgcgcttgaggatggtatctatgatgatacctaccagatgatcaacgcctttaacggaaagcccgttgtctgtgaggggtatgccaaggcgtttaagtatctctgcgatgaaagcaatatcggctgcctgatcgtagagggccacattggttccggcacaggcgccggcaaccacatgtggaattacgtcgagttggatggcaactggtatcttgtcgacgtcaccaacaacgacggcagtgatgaaagcatggtcaatacgcccggcgattttacggaaaatctcttggctatcggttctggtaatccgtattacagccttcttggcttcgatccgctgtattacaccgacggcacaccggtcccgacgccgccggccgtcacgctcagtgtcgaggattatacggagcttaccggtgaaaaggtcaacgtcgcagttgaatcgagcacctcgaagcaggtcgttctcaaattgacgttggaaaatccgagcgcctctatgccggtcgttgcgcagactgatgtgtccgttgcgccggccgctgaaattgccggcttcaaacaggaaaccgacaagatcaccatcgactttgccaagcgccttgacgccggtacatatactgtcaccatcaagaacaacgaggattatcattacaattccgtttcgttcgaggtgcctgaggtcgacaagtatgccgctccggtgattgcggttgcttataacgaaaatcacaccagcgcggacattacaatttccaacccgaacaatgcgggcacaatcaagtatacggttaatggcggtgcagaaacggtttataccgattccttcacagtcgatacaaatacgcctgaccaccgtctcacaaagcagatttccgcttatgtcgagagcacagacgaggatttccaaagctccgataaggcaaaccaggttgtcacgctcgtggccgaccccgattcattccatgttgttgtcacccccgtggcgggcttgaccggcacgatcgctgcggatacagttgtcgcttcgatggaagcgaagaatgttccgtacagcctcgatgttatgtataaccttgaaagcggttcggagggcagcttcggcgttgatggcgataagattgttgccaatggcgacgtcgccccgggaagctatgtcgtttacgtttccgcacgtccgatcgttgacagcggcaatcttgacagcggtgatccgtccaatctcggaattggttacggagaggcggtcattgtgatcaacagccagccgacttccggaggcggctcctctggcggcggcggttcctcctccggcggcagcaagctgaacaacaagggcagcgtttcgaccggttcaaccggcggcgcgcgcgtcccggtatctccggccgctgcaggtaaggaagccggaaaatcggcagaaaatgcgatcaaggatgcgttggccaatggctccaacacggcagtcgccccggttgtcatccgcaatggctcgtccatcggcgcagacgccctcaaggcggtcaaagatgcggttgatcaggcagcggccggcactggcgtgaatgtcactccggtcgtttggtccgatgtcgtcaggaatggcgttgtgcagtcacgtatgtatatcgatcctgcaaagtacgcttcgcttacaggcgatatcaagcttggcgttgaactgtccgctccttcggtttccacgctgtttgacaagtatttctccaacaatatcaggattgtcaaatttgagcataccggcccgttcggcatggcgattgaagttgctgtgaagctcgatctgaccaacatgaatacggagaatctgtatttctattcgtatgacgctgcgacaaacgtctatacgccgattgccaatccgatgtactacatcgatacgaacggctatctgcactttactgtttccaatggcggacatgtcatcatttcagacggtccgctggcacgcaaataa

SEQ ID NO: 1815 - DNA, 3225 bp, Anaerotruncus colihominis
atgaatcagcgggggctaaaagccgtcagtctcgtgctggccgcggctataacctgcgcgtccgtgctttccggctgcgcgaagtcaaacggcacgcagagcaccgccgcatccccggcttcgtccgaagctgctcaaacagaccaacaggtcgtctccgggccgttcacaggaccggacgccgccggcgtcaaaaaaagcgaaactgtctttatcaatcttgacccgaccggcaaaccatatgaaacgacggtcacagactggatccacagcgatacgcctgacgccgtattaaacgacctgtccgacctgacaggcattgaaaatatcaagggattgcagcagccccgccaggagggcgatcgcctgacatggaaaatggagggcagcgacctgtattacacaggtaaaactgacaaggaaccgcccgttgatgttgaaattacatatacacttgatggcaaatccatcgagccgcaggagctgccgggcaaatcaggacaattgtccatgacggttcggtttcgcaatacacaaaagcagcgcgtgaccatcgccggcaaggataccgatatgtatacgccaatgctggttgcggcaggcatgtcgctgccggacgataccttccaaaatgtcgaggtcagcgagggcagcgttatttcagacggcagcaaccagatcgtcgcctttgcgtgcgtaccggggcttaacgacagcctggctctcgggacctatcgtatacaggaaatcaatgatttggatttcccagaggaattcactgttaaagcggatgttcaaaattttgaaatgggtcctgttatggtcgccgtcacacctgagcttccggatcttgacgaactgacaaagagcgatgaatttgacgatatgcgccaagacctcactgatttgcaggatatgcaggacgatctgaatacaatcgatcctgaccgcgacattcgctcgcttctgactgatccaaatcgtaccgaagcggcgcgtgtgattacaaacgatgtattcgatttttatgatctcaataaggatctgcttgatatccttcccaaatatgtaactgatgaaaatattcgcctttatgaccgtatccggcatgatattaaggacggagcgttcgattccctgctggatgatgatgagcttgccgatctgatcgatctggtcgacgatttaagccccaatcgcttgcaggagcttgccgacgattacgccgagctgcaaaaaaacgataagctgcgcgcggcgcttaaacagcttatgggcgcagccaacccggacacagaaaagctgcttgatcttttgatgcaagtatatggcgcaatcaacagcgacaccgccgtcaaggaggctggactgaccgcgctcaacgggctgatccagcgcccggagctgttgaccgcgagcgcccaggcggccttgcggcagggcgtgcgcgacgcgctgatgaaatgcatcaatgtccaggagcagacggcagccggtatgcttcagatggtactagcacaatcaaagctgaattcacgtttgcaggcagaacttgtagccgccagctacgccgggctgattgttgatccgtccaggacgcgtgctattcgtcatgccgatgacgttgcggacgcctcctccatcctggacgaggacgtttcctccgcgcctgacgaggatgcttcctccacacctgacgaggatgctccctccacacctgacgaggatgctccctccacacctgacgaggatgctccctccacacctgacgaggatgctccctccacacctgacgaggatgctccctccacacctgacgaggatgctccctccacacctgacgaggatgctccctccacacctgacgaggatgctccctccacacctgacgaggatgctccctccacacctgacgaggatgcttcctccacacctgacgaggatgcttcctccgcgcctgacgaaaaggctccgactgtctttgaatcgataaccgaaaacacagttgtcaatagaacgcggacattggctgcattcacaaataatgcagacggcgacacgtcctctgcgccgaacgatggcacgtcctctgtaccgaacggcgacacgtcctctgcgccggacggcgacacgtcctctgcgccggacggcgacacgtcctctgcgccggacggcgacacgtcctctgcgccggacgacgatacgtcctctgcgccggacgacaatacgtcctctgcgccggacgacgatacgtcctctgcgccaaatgatgatacgtcctctgcgccatttgtcccctccgagccaatcaaaccgcttgcctccgaccgcgccgacctttacaaggaaattacaaccgatacaaatgccggttattatctgattgaaggtgcaatcgacgcatatgtgaacaatgccgatccagccgagctgcttacgctggcaaagcagttcgacccacaggctgccagccaggtagaaagtatgcaggccatacaggcgctgcttggtcaaattgggccggatcgtctcacttccctgctttcgcaggctcagacatgtgaaaagtacctctccgatctgttgacagcggttcagcagcctgagttgaaagaatatctggaaaagctgatgagggaccttcaggacaacgaagaaaacctgcataccctgatcctgcttctcagacagcttgatgacatgaatctgcttgacgaagtcgaaaacatcgacgacctgcgtgaggacctttccgatctgcgtccgattgtacaatcactgcggcgtgatctcgaccgggcagagatgaacaagagcctgcacgcttcccctgaaacggtcgataccctactgcgtatgaaggacgacctggaggaacaccgcgatatcatggaaacgatgcgcaacatgctccaggaagaaaaagtaaccctttctcgcagcatgatcgcaacgcttgaccgcctcgaggccaaagacgcggcaggcagcgccgtggaaaagcttgacgatcttgacgagctgcttgaacgcaaggatcgttataccgagctttcagacgcataccgtattttcacggccgcgccagacagcatggataccgatgttaaatttgtaatgaaaacggatgagatcaagctgcccgatgatgatgaacccgtccagacgcctgtgcaggagcaggaaggttttgtcgcctggttcaagggcctattccagtcctga

SEQ ID NO: 1816 - DNA, 2640 bp, Anaerotruncus colihominis
atggacactggaggaaaagatatgccgaaacagctggacaaggtctacgaccccaagcaggtcgaggacaaaacgtaccggttctggcaggatggcggatattttcacgccgagccgaacccggacaaaaagccgtatacaattgtgattccgccgccgaatatcaccggacggctgcatatggggcatgcccttgacgagacgcttcaggatatcctgatccggtggcgcagaatgcagggttatgaggcgctctggctgccgggaaccgaccatgcgtcgattgcgacggaggcaaagattgttgaagcgatgcgccaggaaggcgtgaccaaggaacagctcggccgcgagggctttttagagcgcgcctgggcatggaaaagggaatacggtggccatatcctcgatcagcttaaaaagcttggttcctcctgcgattggcagcgcgagcggttcacgcttgacgaggggtgcagccgcgccgtgcgcgaggtattcgtgcgtttctttgagcaggggctgatttaccgcggcgagcgcattgtcaactggtgcccgcattgcctctccacaatctcggatattgaagtggagtatgaggagaaggacggctttttctggcacatcaattatccgatcgtcggcacggacgatgtgcttgaaatcgcaacgacacggccggaaacgctgcttggcgatacggctgtcgcggtgcatccggacgacgagcggtataagcatctgattggaaaaatggtgctgctgccgattgtcaacaaacaaattcccattgtcgccgacgaatatgtcgagatggattttggaacgggcgttgtgaagattacgcctgcacacgacccgaatgacttcgaagtcggcctgcgccacggcctgcccatcgtgaacgttatgaacgacgatgcgaccatcaacgaaaacggcgggaaatacaagggtttgacgcgcgaagaatgccgccggcagattgtaaaggatctggaggacggcggttttctcaaagctgtggagccatataagcacaatgttgggtcctgttaccgctgcggcagcgtcattgagccgcgcgtctccaagcagtggttcgttaagatggagccgctcgccaagccggcggtcgaggccgtgcgcagcggccggacgcgctttattccggagcggtttgataagatttatttcaactggatggaaaacatcaaagactggtgcatttcccgtcagctttggtggggccaccgcatccccgcatggtattgcaccggctgcggtgaaatgatcgtaagccgcgaaacgccgcaaacctgcccgaaatgcggctcgcatcggcttgagcaggaccccgacacgctcgacacatggttctcgtccgcgctgtggcctttctccacgctcggatggccggacgatacgccggagctgcgttatttctatccaacggacacgcttgtcaccggatacgacatcatcttcttctgggtggcgcgcatgatcttttcgggcttggcgcatatggacgaggcgccgtttaaaacggtgctgatccatgggcttgtacgcgacgcgcagggacgcaagatgtcaaagagtttgggcaacgggatcgatccgctggagatcatcgaccgctacggcgcggacgcgttgcgcttcacactggcgacgggcaattcgccaggcaacgatatgcgtttctcggatgaaaaagtgaacgcgtcgcgtaactttgcaaataagatctggaatgcgtcgcgctttatcctgatgaacctgtcggacgatgtagagccggggctgccggagacactcaatatcgaggataagtgggtcctttcgaaatacagaacgcttgtgcgcgaggttacggacaatcttgaaaaattcgaacttggtttggccgttcagaagctgtacgattttatttgggatattctgtgcgactggtatatcgagctgtgtaaatcacgcctgcaggcgggcggcgagacgtccgaggcggcgcagcgcgtgctggtgtacgtcatgaccggcacgcttaagcttctgcatccgtttatgccgtttatcaccgaggaaatctggcaggcgctgccgcacgacggggaaagcatcatggtcgcgacgtggccgcaggccgatgccgcgctcgatttctccgccgacgaatccgacttcgagatgattatgcaggtgatccgcgccatccgcgcccgccgtggagagatgaacgtgccgccgtcgaaaaagacgcgtctgtttatcatgacggcgcataaggctgtatttgagcagggacgcccattttttgcgcgccttgcgttcgcttccgatgtggagcttggcgacagctttgacgcagacggttccgttcaggtcgtgaccgacgccgcgcgcgtctttatccctatggacgagcttgtggatcgggagaaggagcttgcgcgccttggacgtgagaaagccgcctgtgaaaaggacatcgcggcgctgtcgtccaagctggacaaccccggctttgtcgccaaggcgccggcgcaggtggttgacggcgagcgtgccaagcttgcaaaagcgcgtgagcggcttgcaaagatcgaggagagtatcgctgcattttcttaa

SEQ ID NO: 1817 - DNA, 3084 bp, Anaerotruncus colihominis
atgaatctgacaaagcttgtactaaaacgccccgtctcgatggttatgatcatcctggcgttgattgtatttggtttctcggcgatcacaggcgctccgcttgagctgatgcccgagatggaaatgccggttctgcttgttatgacgacatatcctggcgccggtccccaggaggtcgaggacctcgttaccagccagttggagtcctctgtatccacgcttaacggtatcaaaacgatccaatctgtgtcgcaggacagcgtctctttgatggttcttcagcttgaatacggcaccaatatggatgtcgcgcacatggatttgcaggaaaagctgaatatgtacagcggcgccctgccggacgatgcgcaggatccaatcatcattgagatggatctgaattcgatgagcgcaattacgctgtccgcgcgcgccactggagatatcgatctgctttcttatatcgatgaggagattaagccggagtttgaaaagcttggcggcgtcgcatcggtcgatgtttccggcggacaggaaaattatatcagcgttgagcttgatgagcagcgccttaaacaatatggcctggatatgagcacgattgtcagtttcatcggtgctgctgatttttcaatcccggtcggcgacattgaccgcggcgatcaaagcctgtcgttgcgcggcggcgtcagctatgataccgtcgagagtctcggaaatattccgatcacgctgcgttccggtcaggtaatccatctgtccgatgtcgcacatatctacgacgcaactgctgacgcagattctatcagccggtataatggcaatgaaaccgtcagtctcggcattaaaaagcgtcagagcgcaggtaccatcgaggttacagaagctgtcgtcaaaacaatggaacagatcaacgcgcgcaatatgggcgtcgaattgtccgttatcaatgatacgagcgacagtatccgcagttcggtcaacagtgttatcaaaacactgatttccgctatcatcctctgtatgatcgtactgtttatcttcttcggcgactggaaagcttctctaatcgttggcagttctatccctgtttccgtattgacaacgctgatcctgatgaacgcctttggattttctttcaatattgtttcattgggcggccttgtcatcggcgtcggtatgatggtagataactcaatcgtggttctggaaagctgcttccaaaggcgggaacgcaatttgactttccgtgacgcagccatcgaaggcgcgcggattgttacctcgtccgtcgcagcgtctacgcttacgaccgtcgtggtattcctgcccataagcattatggagggactttccggacagatgttccgtcagcttggctttacaattgtcttttccctgaccgcttcgctgatctcggcgcttaccattgttccactcctgttttaccggctcgcgccaaaggagaaggaggattcccatgtcaaccgtgtcctgaataagataacgattgcatacggaaatttcctgaaaaaaacgttcaggcataagctgcttgtagtgcttatctcagtcggactgcttgtcgggtcatttatgcttcttccgttcattcattttcagctcatgccggatattgaccagggtaccatttcgatttccgtagagacaaagccaggcctcaagctggaaaaagtggatgcgcttatgacgcaattggaatccatggttcaagagtccaccgacgttgaacgctattacttgactgccggcggcggcgcaatgaccagcactggaaacgaaagcggttctctgactgtttatctgaaagcagaccgtgaacgcagcacaaacgagtggatcgatgaatggcgcgaacagacaaaggatattcccaactgtgatatcagcatcagcgcacagagcatgatgagcttttcttccggaggatctgtcgatgttaacctccagggcaacgatctcgatttgctgcgtgaagcgtcaaaggacgttgaagcagtgatgggacagaatcccaatattgtccgcgtatcctcaaccctcacttcgggcaatccacaggctgagattgttgtcgaccccattaaggcgactgcggtcggcatgacgcctcagcaggtggttggaaccgtatacaacatggtatccggtacctctccggccactatggaccgcgatggacgtgaatatgacattcgcatcgagtttcccaaggaacgtttccaaacggtatctgatctctccgggttgattttgacttctccaagcggcaaacaggtcccgctgctagatatcgcatcaatcgaatattccaacgctccgcaaagcatccagcgtaaaaacaatcaatacattgtcacaatcagcggtcagcctacgacagcctcggctctgacagccggcgaagaaattaaacaggcggtcgcagagcttgaactgccagaaggcgtggctgtcacacagaatcaagccgatgaacagatgatggaggagtttggcgcattattcggtgcgattgcaacggctgtcttcctcgtttttatggtcatggccatgcaatttgaatcgtgcagattctcaatcatcgttatgatttgtattccattctctctgattggttcgtttggcttgatgctgttgtcgggtgttacaatgagtatgccgtccttgattggatttttgatgcttgttggtacagttatcaataacggtatcctgtttatcgatacggcaaaccaataccgatccagtatggacgccgaaacggctcttgtctatgccggccgcagccgtctgcgtccgattctgatgacgaccctgacaacggttttatcaatgattccgatgggccttggaatcggcgaaggttccgaggctatgcagggaatggcagttgtaatcatcggcggtttgacagcttccaccattctgacgcttctcctgctgccgaccttctatctgctgttccgcggacggccgcataaggaatataaaaaagaggaggacaccaagaacggaaatacccatcccgatctttcccaggaagaactgattacacaataa

SEQ ID NO: 1818 - DNA, 2751 bp, Anaerotruncus colihominis
ttggctgtcggcaaaacgcctgagcttgccaacagcccgtgttttgaggaggttatcatggcagcaaaaccaaaatcaggttcgcgcggcaaaggcggcagcgccgctgcgcgcaagcgcaatgccgctcaaaagcgcgccaaacgccagatgcaggctgtaatcctgtttgcagtcggcgtgctggtcggcgcgctgacgctcgtttctggcgcaagcgcctggaattggcttcacaacgccctgtttggtctgttcggctggggcgcgatctttgtgtgcgtcctgctgatctacatagcggcattgcttacgatggacaagcctgtcaagggacgcgcctggatgggcggatttttaattctttttttctgcgcgtcgcttcaaatctttgtgatgggtatgccgcagtccgctgatgaaaacatccttgaaatgcttgttgaatgtattgtggcgggcatcgacgtcaaaagcggcggcctggtcggagcgctggttggcgtgccactgctcaagttctgcggcaagctcggcgcgggtattatcatcgtgcttctgatcttcgtgttcctgatgctgacgaccggcggcacgctgatcggcatcgtccaggcggcgcataagcccgtgcagaagatcggcgagacgtacgccgaccagatggagcgccaggagcagcggcgcgccgcccgcgcggccgcgccgccaaagcctgcgcgccagcgcaggccggcgcgcatcgatattccgcttgagggcgaagaccgcacgggcgccgcgctggctccggccacgccggagccgtccgccgaggcggactcggagccgcaggctccggcagcggcggcgcgtgcggatgctccgcaccatccaaagccgtcgattgatatcccgcttgacgagccgttcgacccggcacgggaatccggattctccctgatgccggccgacgaggcgatgcagtttgtcgccgctcctgagccgtcgatcgacgagcttgtgacaaaggctgcgaccgatacggggcgtttttccttctccgctgaagaaacgccctccttcgacagcttcaccatgccaaaggagccgcacagcggcgccgtgtccggtacggtcatcaatctgccgccgattctcgacgatccaccggataaacctgacgtcatgcctgaggagccggccccggatgctgctctatgggacgagccggggcaggaacaggcgcatgtcccggaccctcccgccgaaccggagccgcagcccgtaccgccggcctatcgcaagccgccgctctccctgcttcatgaggcgcgccgtacaagcgaatcggatgtcacagaggagatgaaggcgaatgcgcagcgtctcgtcgacacgctcgcgtcatttggcgtgcagacgcgcatcgtcgatatctcacgcggcccggcggtcacacggtatgagcttcagccgtcggccggagtcaaaatcagccggattaccgggcttgccgacgacatcgccctcaacctcgcctcggcgggcgtgcgcatcgaagcgccgattcccaataaggccgccgtcggcatcgaggtgcccaataaggtcgtgagcgccgtttccatccgtgaaatccttgaagcgcgcgaattttacgaagcgaaaagcaagctgtctgttgcactcggacgcgatatcgcaggcaatgtcacggttgccgacatcggaaaaatgccgcacctgctgatcgccggctcgaccggctccggaaaatcggtgtgcatcaattccatcattatttccctgctctttaattcgacgccggacgaggtccgttttctgatgatcgatccaaaagtcgtcgagcttggcgtttataacggcatcccgcaattgctcgttccggttgtgaccgatccgaaaaaagccgccggcgcgctgtcatgggctgttaccgagatgctcaagcgttataagctgtttgccgataactccgtgcgcgacttgaaatcgtttaaccaccttgccgaacgtactgaaggtatggaaaaaatgccgcaggtcgtcatcatcatcgacgagttggccgatttgatgatggctgcgccgaacgaaattgaggattatatctgccgtctggcgcagatggcgcgcgcagccggtatgcatctgattatcgcgacgcagcgcccctccgtcgacgtcatcaccggcgtcatcaaggcaaatatcccttcccgcatcgcctttgccgtgtcctcgcaggtcgactcgcgcaccattctcgatatgggcggcgcggaaaagctgcttggccggggcgatatgctgttcagcccggtcggcgctcccaaaccgatccgcgtgcagggctgctttgtcaccgacgaggagattgaaagcgtcgtatcgtttatcaagaacgattcgtccgccgcatatgacgaatcaatcgtgcaggaaatcgacagccatgttgtcgctggaaaaggctccaagggtggcggcgcggcctctgaaaacgcggatgccgacagcggcgaggatgaaatgctcatgcccgcgattgaatgcgtcgtggaagccggcatggcgtcgacttcgcttttgcagcggcgtctcaagctcggctatgcgcgcgccgcgcggattgtcgacgagatggaatcgcgcggcatcgtcggcccgttcgagggcagcaagccgcgtcaggtgcttatttctccggaacgctgggctgaaatgaagctgaaccgccaggaataa

SEQ ID NO: 1819 - DNA, 2160 bp, Anaerotruncus colihominis
atgtcaatcaagatcgcgctcgcaggcaatccaaactgcggcaaaaccacgatgtttaacgatctgacaggatcgtcgcagtatgtcggcaactggcccggcgtcactgtcgagaagaaggaaggcaagctgcgcggacagaaggatgtcattatcacggatctgcccggcatttacagcttgtcgccctatacgcttgaggaggtcgtcacgcgcaactacatcatggatgagcggccggatgtcgtcgtcaatctggtcgacgcgtccaacatcgagcgcaacctgtatctgacgacgcagctcacagagatgggcatcccagtgctgatcgcgttgaacatgatggatatcgtcaagaaaaacggcgaccgcatcgatacgaaaaagctttccgaacagcttggctgcgagattatcgagacgtcggccgtcaagggcgaaggtttaaaagcgctggcggactgcgcggtcaagatggcgcggtccggtgtgaaaaccacgccgcagcacacgttcgaccagcgcgttgagcaggctctttccgaaatcgcatctctgatcagcgatgtggttccggccgaaagtctgcgctggtacagcgtcaagctgtttgagcgggacgaaaaggcgatggaacgcttttcattcgctgccgatacaaaggagcacctcgagcagatcatagccggctgtgaaaaacagttcgacgacgacagcgaaagcattattacaaacgaacgctaccagtatatcggcacactgatgcagagctgtgtacataaaaagaaatccggtatgacaacgtcggataagatcgatcagattgtgacaaaccgcatcctggcgctgccgatttttgcggtggtcatgtatattgtttatttcgtatcggtttcctggcttgggaccattgttacagactggacgaacgacacgttgttcgctgaaacgattcagcctgctgtcgcgggcgtgctcgagagcatcggcgcggccgcctggctggaaggtttaatcgtcgacggcatcatcggcggcgtgggcgcggtgctcggtttcgttccgcagatgtttatcctgttcttcttcctgtccatcctggaggactgcggctacatggcgcgcgtcgcgtttatcatggaccgtattttccgtcgtttcggactctccggcaagagcttcatcccgatgctgatctcctcgggctgcggcgtgccgggcgtcatggcgacgcgtaccatcgaaaatgaaaaggaccgccgcatgacgatcatgacgacgaccttcatcccctgcggcgcaaagttgccgatcatcgccctgatcgccggcgcaatgttccccaatgtcacctggatggctccggccacctatttcttcggcatctttatggtcatcatctccggcatcatcctcaagaaaacgaagatgttcgccggcgacccggctccgtttgtcatggagctgccgcagtaccacttcccggcgccaaagggcgtgctgatccacatgtgggagcgcggcaaggcgtttatcatcaaagccggtacggtcatctttgtggcctgcggcgtaatctggttcctccagagcttcggttttggtcctgatggattcggtatggtcgatgacgagaacatgagtatgctggccgctatcggcaatgtgctcgctccgatcttcgccccgctcggctttggaaactggcaggcggctgtcgcgagcgtctccggccttgtagcgaaggagaacgtcgtcggtacgttcggcgttctgtttggactgggcgaggtaggcgaggacgatccggccctgctggccgctctgcccacactgttcgccactcatgcaagcgcgcttgcgttcatggtctttaacctgacctgcgctccgtgcttcgcggccatcggcgcgattcgccgcgagatgaacagcgccaaatggacatggttcgccatcggctatatgacgggtatggcttatgtgatggccttcatcatcaatcagctcggcggcacgattttctatggcgttccctttggaatcggccaggtgattgcgctcgtgcttgtagccgctttgctgtggcttttgttccgcagctataaacccgccggaatgtccaagcgtccggccgctgccggcgcccgtgcgtaa

SEQ ID NO: 1820 - DNA, 3621 bp, Anaerotruncus colihominis
ttgccgcttgcaaaagaaaagaggggttcgcttttggaatttaatgtatttgaatcgataaaaatcggactggcgtcgccggatcttgtccgcgaatggtcgtggggcgaggttaagaagccggaaaccatcaactaccgcaccctcaagccggagcgtgaagggctgttctgcgaaaagatctttggaccgacaaaggactgggaatgctattgcggccgctacaagcgcatccgctacaagggcaaggtctgcgaacgctgcggcgtcgaggtcacgcgttccaaggtgcgccgcgagcgcatgggccacatcgagctggccgcgccggtttcgcatatctggtacttcaagggaacgagcagccgcatggggctgctgctcaatatgtcgccgcgcctgctggagaaggtgctctatttcgcgtcgtatattgtcatcgatccgggcgttacgaatcttaaaaaatatacgctgctttccgaaaaggaataccgcgacctcaaggaggcgtatgaggacgatttccgcgccggcatgggggcggaggcggtcaaggagctgctggccgagctggatctcgacaagctttcggaggaactgaaaacggatcttgaaacagccgccggccagaagcgcgtcaaactgctcaagcgccttgaggtggtcgaggcgttccgccagagccacaaccggcccgagtggatgatcctggatgttgtgccggttattccgccggatatccgcccgatggttcagctcgacggcggccgttttgcaacgagcgacctcaacgacctgtaccgccgtgtcatcaaccgcaacaaccgtctgaagaagctgctggagcttggcgcgcccgacatcatcgtgcgcaacgaaaagcgtatgctccaggaggcggtcgacgcgctgatcgacaacggccgccgcggccgcccggtcacagggccgagcaaccgcccgctcaagtcgctgtccgatatgctcaagggcaaacagggacgtttccgtcaaaacctgctcggtaagcgtgtcgactattcgggccgttccgttatcgtcgtcgggccggagctgaagatgtatcagtgcggcctgcccaaggaaatggcgctcgagctgtttaagccgtttgttatgaagcgtctggtcgatctcaaggttgccaccaacattaaaaacgcgcgcaaaatggtcgagcgcgcgagcgtcaaggacgtgtgggacgcgctcgaggtcgtcatcaaggaccatcccgtgctgctcaaccgcgcgccgacgctgcacaggctcggcatccaggcgttcgagccggtcctcgtcgagggccgcgcgctcaagctccatccgcttgtctgcaccgcctacaacgccgacttcgacggcgaccagatggccgtgcacgtcccgctttccgcggaggcgcagtctgaagcgcgctttttgatgctcgccgcgaacaatctgctcaagccgtccgacggaaagcccgtcaccgtcccgacgcaggacatggtgctcggctcgtattatctgacgatgctgcgcgaggaggagccaggcgccggcaaggtattccgcgacttcaacgaggccaccatggcgtatcaggcgggcgcggtcggacttcatgcgccgatcaaggtgcgcgtcacacgccaggtcggcgacgagcgcgtctcgcatatcatcgacacaacggtcgggcgcatcatcttcaatgaccccatcccgcaggatttgggctatgtagaccgcaacgacccggagcatgtgttcgatcttgaaatcggatttttggtgcgcaagaaggaacttggaaagatcatcgaccgctgtatccgcacgtatgggaccgccaagacggccgaggtgctcgaccgcatcaaggcgcagggctttaaatattccacgcgcggggcgatcaccgtcgccgtttacgacgcggtcatcccgcccgaaaaggccgagttcatcgcggcggctgacaagcaggtcgatgcgatcaaacgccagtatgaccgcggctttatctccgaggatgtgcggtacgagcgcgtcgtctcaacgtggaacgactgcacggccaaggtcaaggacgcgctgcaaaagacacttgacgagcgcaacccaatctatatgatggccgattccggcgcccgcggttcgatggaccagattcgccagctcgccggcatgcgcggcctgattgcgaacacatccggccgtgcgatcgaaatcccgatcaaggccaactaccgcgagggccttaacattctggaatacttcaattcctcgcgaggcgcgcgcaagggcctggccgacacggcgctgcgcacggcggattctggttatctgacgcgccgtctcgtcgacgtctctcaggacgttattgtgcgcgagcatgactgcggcacgcatgagggcattgtcgtctgcgacatcgtcgacagcggccgtgtcattgaggactttgtcgagcgcatgatcggccgctacgcggccgacgacgtgatcgatccgaatacgggcgaggtgatcgtcagccgcgatcagatgatgaccgaggccgacgcgcagcgcatcaaggcggcgggcttcacagagctgaagatccgcacgccgctcaattgcgaatcaaaaatcggcgtttgtgccaaatgttacggcgcgaacctcgccaacgggcagcctgtgggcgtcggtgaagcggtcggcatcatcgccgcgcagtcgatcggcgagccgggcacgcagttgacaatgcgcacattccatacgggcggtattgcgtccgccgccgatatcacgcaaggtcttccgcgcgttgaggagctgtttgaggcgcgcaagccgaaaaacagcgcggtcatttcgcatctcgacggcatcgtttcgttcgagaaagatcagaagggcggcgactttgtcgtcgtcaccgccgatgacggcgagcgttttgagcggcaggtcgtctatggatcgacactgcgcgtctcagaaggggacgttgtgcgcaagggcgacatgattaccgaaggcgcggtcgagccgaatgagattctcatggtttccggccatctggccgttcaggactacctgattaaagaagtgcagagaacgtaccggacacagggtgttgacatcaacgataagcacatcgaggtcattgtccgccagatgatgcgcaaggtcaagattgacgacggcggagacaccgggctgattaccggcgcgaatgtcgacaagagcgagcttctgcgcgtcaacgctgaaattgagcgtaaaaacgccgaggacggcggtacgcgccgtcccgcttcggggctgccggttctgctcggcatcacaaaggcgtcgcttgcgacggagagcttcatgtcggccgcttccttccaggaaacgacacgtgtgctgactgaggccgcgatcaagggcaaggtcgacaagctccagggattaaaggaaaacgtcatcatcggcaagcttgtcccggctggcaccggcacggtttcctacgattcgctcgagcttgtgaacgcgggcggaccgtccgaccacggcgactacgagtttattgccaacatcagcggcgccgacgatatgcagcccgcctga

SEQ ID NO: 1821 - DNA, 2838 bp, Anaerotruncus colihominis
atgacaatagacaaacaaggagagatctgtccaatgtccgaaatggattacagcaagacgcttaacctgccaaaaactgatttttcaatgcgcgctgggcttccccagaaggaacccgtcatggtgaaaaaatgggatgaagaacatctgtatgagcggatgcttgagaaaaacgaaggcaagccgctttacatgttccacgatggcccgccgtatgcaaacgccaatattcatcttggcacggcgctgaacaaggtgctcaaggatatcattgtccgccagaagaatctctccggctttaaagcgccatatacgccggggtgggatacgcatggccttccgattgagctcaaggcgctcaaggagatcggagtttccagcgacatcgccccgattgagctgcgccgggtctgccatgattttgcgctgcgcttcgtcgagaaccagaaggagcagttcaaacgcctcggcaccattgccgattatgagcacccttatctgacgctcaagccggaatacgaagcgcggcaggttgaaatttttggagcgatggccaacaagggttatatttataagggattaaagcctgtatactggtgcccgacctgcgaaacggcgctggccgaggcggaaatcgagtacaatgaggacaagtgcaattccatctatgtcaagttcaatgtgatcgacgacaaggatggtgttttggagcgcctcggcgcgaaggatctttctaaaacgtttgttgtcatctggacgacgacgacttggactttgccaggcaatatggctatctgtgtcgggccggcatttgaatattgtgtcgtcgctgcaaacagcgaatattatgtaatggccaaggagcttgtcggggcttcgatgaaggctgccggaattgcagattacgaaatcctgggcacttgtctcggggaggagctggaatacatcacctaccagcatccgttccttgaccggcagtcgcctgtcattcttggcgaccatgtcacgttggagagcggcaccggttgcgtccataccgcgcctggacacggtgttgaggactttgatgtctgcgcgcagcattatccagagattgaggtcgtcgtaccggtcgataaatttggcaatctgaccgaactggccggagaatttgccggtctttcgacggacgatgcgaatgctgcgatcgtcaagaagctggcttctaccgggaacctgtttgccattgagaaaatcgtccaccagtatccgcattgctggcgctgtaaggacccgatcatctaccgcgcgacagagcagtggttttgttccgtcgacgatatcaaggaacagactgtgtccgagatcgaaaaggttgcgtttgttcctgaatggggccgcggccgcatgatcaatatggtgcgtgaccgcagcgattggtgtatttcgcgtcagcgtacctggggcgtgccgattccgattttctactgtaagcaatgcggaaaatatcatgtaaatgaaacaagcattgaggctgtcgcggccctgttcagggaaaaaggttccgacgcctggtatacgaccgacgcggcggatattctgcccgccggcacaaaatgcgccgcctgcggctgtacggaatttgttaaggaaacagacattatggatgtttggttcgattccggaacatcctatgcgtccgttatccacgacaatcccgatttgaagtggccggccgacctctatcttgaaggcaccgaccaataccgcggatggttccagtcatccctgctgacttcggtcgcatggaagggcgtcgcgccatataagacggtctgcacgcatggatgggttgtcgacggcgaggggcgcaagatgtccaagagccttggcaacggaatggaaccttctgaaatcaccgatcagtatggcgcggatatcctgcgcctgtgggttgcttcagccgattatcatgcggatatccgtatttcgaaggacatcctcaagcagctttccgaggtgtatcgcaaaatccgcaataccgcgcgttatatcctggggaatatcgccggctttacgcccgataaagatgcggttgcctttgaccggctgaccgggcttgacagatgggcgctcacacgtttcaatgaacttgtcaagacggttacagaggcgtatgaccgctttgaattccacatcatttatcatgcgctccacaatttctgtacgattgatatgtccaacttctatcttgacgtgatcaaggaccgcctgtatgtcgaggcccctgattcagaggaccgccgtgcggcgcagagcacaatctacacaatcctgcgcggtatgacgctgctgtttgctccgatcatcccatttacggcggaggaaatttggagctttatgcctgacgacagccgctatgatggtgcatctgtgatgttcaatgagatgcccagggtcattgagggcatttcagatgaggcgtttatggagaagtgggatcgtattcacgctttgcgcgacgatgtgcttaaggcgcttgaggctgcccgtaatgccaaaacaatcggtaaatcgctcgaggcgaaggtagtgctgcactttgacggcagccttgcggagcagatcggtctgacattggatgagctggcaaccgtgttcatcgtttcccaggtggaggttacagcggaaggggctggctcatatcaggggacggttccgttcctgcccggtcttacaattgagattgcgcatgctgacggagcgcattgcccgcgttgctgggtgtacagcgatacagtcggcaaggatgcgcggcatccgacgctttgcgcccgctgcgcacagatcatcggctaa

SEQ ID NO: 1822 - DNA, 3579 bp, Anaerotruncus colihominis
atgtgtagtttgcggcttcgcggtttggagatacagggatttaaatcgttcccggacaaaacaaggctgacctttcacgatgggatcaccgctgtggtcggcccgaacggaagcggcaagagcaacattgccgacgcggtgcgatgggttctcggtgagcagtcgacgaaaacgctgcgcggcggcaaaatggaggatgtgatcttcggcggcacacaggcgcgcaagccccagggctacgcccatgtgcagcttacgattgaaaacgcggacggcgcgctgccctatgacagcgccgaggtgagcgtttcgcgccgtctgtaccggtcgggcgaaagcgaataccgtatcaacggcacgagcgtgcggcttcgggatgtacatgaactgtttatggacacagggcttggacgcgacggatattcgatcatcggacagggccgcattgcggagattgtgagcgccaaaagcacacagcgccgtgagatctttgaggaagccgccgggatttcaaaataccgttaccgccgtcaggaggcgcagcgccgcctggaggccgctgaggaaaaccttctgcgcctgcgcgacatcctggcggagcttgaagcgcgcgtcggccctttgcaggcgcaggcggaaaaggcgcgccggtttttaacgctggcagaggaaaaaaagacgctggagctgtcgctttggatcgcgacgctcgaccgctcgcgggcgcttctgcgggaacaggaggacaagctcctgttgtgcagggacgatcatgaccgcattcaggcggaaatggacgcggtggaacagcggatcaacgccctgtatgcagatatgcaggcgctcgccgttgagatcgacgaacggcgtgcgcaggcgcggacgcttgaggaggaaaatgcgaacagcagtgcggacatcgcggtgatgcagaacgatctggcgcataaccgcgcttcaatcgaacagatcggcgcggaactgcggcaggcggatgctgacggcggcgggcttgacgagcaaatccgtacatatgaaacggagattgcggacaaacaggcggcgctggagaaactgcaccgtaaacaggaggagacgcagcaggagattgtgaggctgacagccgcccgcgaggactgccggacacgcgcggacgcgcttaaagaacggcgcttcgggcttacgcagagcatccaggaggcgaagctgtcgtcggcgtcgagcggatcgctgattgacgagacgattgcgcggcttgaggcgcttcgggacgcggcggttgtcggcgatgaaaatgcggcgcggatcgaaaaggagcttgcggactgtaagggattgctcgccgaggtgcttgcggcgtcagaatcgctccaaaatacgcgccgcggttatctgctgcgcgccgaggggcgcggcgagaagctcgacgcgcttaaaaagcagcgcgccgcgctcgatgaacaggcgcgcggcttcttacagaaggcgcggctgctcaccgatatggaaaacagcctggagggctttcagagcagtgtcaaatatgttgtctcacaggcgcgccggggcgcgctgtccggcgtgtgcggccctgtctcgaagctgattgaagtcgatggggaccatgcgctggccattgaaattgcgctcggcgcggcgatgcagaatattgtcgttgaggatgaaacagccgccaagcgcgcgattgcgatgctgcgctcgagcaaaacagggcgcgcaacgtttttgccgctgacaacggtgcgcggcgcacggctctcggagggttggctttcctccgctgatgggtttgtgggtatcgcggccgacctggtgcggtgtgacagccgctatgaaggcgttgtggcgcagcttctcgggcgtatcgccattgtgcgcgacatcgactgcgctgttgcgctggcgcggcgcggtgggtataaattccgcgttgtgacgctcgacgggcaggtcgtcaacgcgggcggctcgatgaccggcggctggacggcgcgcagcgcgggaatcctcagccgcgcgcaggagattgaatcactgcgcgcgcaggcaaaggactgcgcggatcggatggagcgcctcgatggtgaaatcaagaccgttcaggaggagctttccgccgcgcaggcggcgatccttggcgtcgacggcgagcttgccacggcgcaggaggaccgcatccggtgtgaatcggagcagaagcgtttattggctgcgcaggcggatgctgcgcgcgtccgtgagcaggcggccagggagtatgaggcgctcgaagcccggctgcgcgaactacgcgccgccggcgtatcagccgacgggctgatacaggagctttccggccagcttgacgaggtagcgcggcagcttggagaagtgaacgagggacgcgacgcgtatgcgtcgcggcttgatcaggcgtcggaggcgctcgcgcaggttaacgtcgccgcagcggcgcttgaaaaggagatcgacggagcgcgtctgatgatggaacagctcgccggacagaaggagcaccgccgggagcaggagcgcgcgctgaaggaacgcgccgcgcgtcttgaggaggaaaacgaggccgtccggcagaggatcagcgatctggaggccgcgcgcagggaacggaccgcgcggattgaaaccattggaacggagattgcagagcgcacggcccggcgcaacgagtgcgagtccggtaccgccgcgctgcgcgcggacgaaaaagagatcgccgcgcggcgtgagacagccgcgcgggaactggcgcgcctggaagaaaaaaaggcgtcgatgcagggcgaatacgacgcgatcatcgcgcgcatgtgggacgaatatgaggtgacgcgttcgcaggccgccgaactggcgcagccggtggaggatacgccggctgcgcagaggcgcctgggggaactcaaaggtaagatcaaggcgcttggcagcgtgaatctgggcgcgattgaggaatacggcgaggtgtcggagcggtatacgtttcttaagacgcagacagaggacgccgagcggtcgcgcgccgagctgctgcggctgattgagcggcttacaagcgatatgcgcacaattttttcggagaacttcactaaaattgccgcgaatttttctgtagtttttacagagctgttcgatgggggcaaagcgtccctgtcgctggcagacccgacggacgtgctggaatcgggcattgatattttcgtacagccgcccggcaagatcattaagaacctgtcggcgctttcgggcggcgagcaggcgtttgtggcgattgcaatctattttgcgatcctcaaggtgcggccgtcgccgttctgcctgctcgacgagatcgaggcggcgctcgacgatgtcaacgtcgtcaaatacgcgcaatatttacgcacgctctgcgataaaacgcagtttatcacgatcacgcaccgccgcgggaccatggaggaggccgacgtgctctatggagtgacgatgcaggaggaaggcgtttccaagctgctggagctgaatgtcggggagatcgagggcaaactcggtatccaataa

SEQ ID NO: 1823 - DNA, 2730 bp, Anaerotruncus colihominis
atgattggagtatcacgtatgctgaatcgacatgaaatcaatgctctcacggatgagcaggcggaacagagccgaaaacagttcggcagcaacgccctgacgcctccggagcagacatccttctggcgcgaactatgggacacgtttcgcggcgacgcgcttgtgcggattttaaccgtcgcgctcgtcatcacgatccttttcgccatctttggcgtcggggactggcttgaagcggtcggtatcgcaatcgccgtcgtgttggccacaacggtttccacgtacagcgaatattccaacaaccagcttttccaaaagctgcaggacgaatattcaaaaatcctctgcaaagcgttccgccgccgcgacggtttggtacaggtctgtgatctgcaaatcgacgacatcgtaaccggcgactttgtccttttgcaggccggcgacaaggtctgcgccgacggtgtcctagtcgacggcgacatcaaggtcaaccaggcgagcttaaacggcgaaagtgaggaagcgagcaagacggccgccgaagccgattacacctatgacgccgaacagatcgattttctggacaagcacaaggtctatcgcggctctgttgtgacaaacggcgaggccatcatgcaggtcaaatgcgtcggagacaaatcgcagttcggccgcctcgcgcaggagctcaaggaggacgaggagcgcgaatcgccgctgaaggtcaaactgggcaaggtagccgatacaatctccaaattcggatatatcggcggtacgctcatcgcaatcgcctttatgatcaactgtatcttctttaatccgacgctgctgccgggcgcgacggcgtatttttccgccgccaatgtaatgcagattctgcgcgatcttgtttcgtctgtaacgcttgccgtcgtcatcatcgtcgtggccgttccggagggcctgccaatgatgatcgcgcttgtatcgggacttaacatgaaaaagctcctcaaggacaacatcctgatccggaaaatcgacggcgcagagacggctggcagtctcaatatcctgttttcggataagaccggcaccatcaccaagggcgccttgcaggtagtcagctttacctctcccgaaggaaacgattaccagtcgttcgaatctataccggaacagctccgtgaaatgctgctcatcaacatctgcggcaatacgaacgcaatcgccttggttcaaaacggacatctccaggtgaccggtggtaacgccaccgagcgcgcgctgcatgaatttgtgggcgtagacggaacactcacctatgaaacctacaagctggagtgcagcgactcactgatgttcaacagctccaacaaatattccgcaagcgtactgcgcggcaagcttaaccgcgctattatcaagggtgccccggaaaagctgctcggcttctgcaccgcctattacggcgaggatttaaagccgcatccgatgacggatgaaatccgcgcccgccttgaagcgcgtatgtccgcgttgtcggaaaaagccatgcgcgtgcttgctttcgccacctctgaaaacggcatcggcgattcgcttttacaggatatgacgtttgtcggccttgtcggtatccgtgacgagctgcgtcctgaagcggtcgaagcgattcataccgctaaaaaagccggtattcaggtcgttatggttacaggcgataaaaaagaaaccgccgccgcaattgcgcgtgacgcgggtctgatcgattcgccagacgacgtagcgatgacaagtgacgatatggcaaagctttccgatgacgagctgaaaaatgtattgccccgcctgcgtgtggtggcgcgcgcccttccgacagataaaagccgccttgtgcgtatttcccaggaaaagaatctggtggtcggcatgaccggcgacggcgtcaacgacgcgcccgccctgaaaaaagcggacgtcggctttgcgatgggttccggcaccgaggtttccaaggaggccgcggaaatcacgattctggacgacaattttaattctcttgtcaaaacggtgctctatggccgcaccatttataacaatatccgtaaatttatagtgttccagcttacgatcaacatcagcgccgttttgattgcgctgatcggtccgttcattggaatgggcacgccgctttccgttacgcagatgctttgggtcaatattgtgatggatacgcttgccgcgctcgcgctcggcggagagccgcctctggcgcgttatatgaatgaaaaacccaagcgccgcgacgaatcgatcatcagtaaaaacatgtggtctgcgctgatcgttgttggaatttatctcacggcggcaagcctgatctttttgcaggttccattcttcaagacgctgttccgtgaggacggcccgatggtctataacggcagcgatatctatttcatgaccggtttcttctgtttctatgtattcagcgccatgctcaacggatttaacgcacgcacggataagctgaatgtattcgacaatatctccggcaataaaatgtttttgtatatcatggggctgatcgttgcaatccaagtccttatgacctttatcggtggttcgattctgcgaaccgcgccgctcacgctgaaggaatggagcgttgtgatcctgctctcactgatcgttctgccggtcggcaccatccgcaagctgatctttccggcaaaggcggaataa

SEQ ID NO: 1824 - DNA, 2574 bp, Anaerotruncus colihominis
atgatacggatgaaacaggaacacgacgccaaggacgaggcgtttgatcccgttctgatagaacagcgcattcacaatgtcgatatcgagcatgaaatgaaacggtcgtttctcgattattcgatgtcggtgattgtcagccgtgcgctgccggatgtgcgcgacggattaaagcctgtacaccggcgtatcctgtatacgctgcatgaaaacggcctgacgcctgacaagccgtaccgcaaatgtgctgataccgttggatctgtgcttggccgttaccatccgcacggagacgcgtctgtttacgatgcaatggtgcggctggcgcaggatttttccatgcggtatccgctggtcgatggacacggcaactttggctcggtcgatggagatccgccggcagcctatcgatacacagaaagccgcatgagtaaaatgtcgctttctatgctgaccgatattgaaaaggaaacagttgattttaccggaaactatgacgaccgccttcaggagccgacggttttgccgtcgcgtttccctaacctgctgtgcaacggatcgacaggtatcgccgtcggtatggcgacaaacataccgccgcacaatctcggcgaggtgatcgatgcggttaatctgctcatcgataaccccgacgcgggccttgacgagatcatgcagcatatcaagggtcccgatttccccaccggcggcgtgatcatggggcgcgcaggaatacgcgccgcatatgcaacggggcgtgcgcggttgacgctgcgcgcgcgcacggaaattgaggagatggcaaacggccgggagcgtattgttgtaaccgaaattccatatatggtcaataaagcgcgtttgattgaatcgatcgccgacctggttaaggataaacgcattgaccagatttctgatctgcgcgacgaatccgaccgtgacggtatgcgcattgtgatcgaattaaagcgcgacgcaaatgcgcaggtggtgttgaaccgtctgtacagttacagccagcttcaggatacggttggagtcattatgctcgcgcttgtgggcggcgtgccgaaggtgatgccgctgaaggatgtactgacacattacatcgattttcagggtgaaattgttacacggcgcaccaagtacgacctgcgccgtgcgaaagagcgtgagcatatcctggaggggcttaagctcgtttgcgacaatacggacgaagtgatttcgatcatccgccattcaaaggatcgtcccgattcgaaagtcaatttgatcgcgcgctttggcattactgatattcaggcgaccgcaattgtggctatgcagcttggacagctttcaggtcttgaacggatcaggattgaggaggagcttgcaaaaatcctggagcgcgtaaaggaatatgaggcaatcctcggcgactatacgcgtgtgatgtcgatcgtcaaggaggaattgggagtcctgcgcgccaaatacgcagacgagcgacgcacagagattgtcgctgtcagcggggaggtcgatatcgaggatttgattccggttgaggactgtgtgattacgctgacacactttggatatctcaagcgccagccggtcgacgcatacaggacgcagcggcgaggcggtcgcggcgtcagcggaatgacgcggcgtgaggaggacttcgtcgaggagctgtttatctgttccacacatgacttcatcatgtttttcacaagcaagggacggtgcttccgccttaagggctatgaaatcagcgaagggtcgcgtacatcacgcggaacaaatattgtcaatctcctttcgatggacagcgacgaaaaggtaacggctcttattaaggtgacgcctgacgaatatgagcgtgaggatcgctgccttgttatggtgacgcgcaaggggattattaaacgaacgccgctgggcgcgtataaaaatgtgcggcgtatgggactgattgcaattggacttgacgatggcgacgagctggcgtgggtgcgtcagacggacggtacaagcgaactgattatcgcaacgaaaaacggtatggcgatccgtttcgatgagcaggacgcacggccgttgtcgcgtacagcgcgcggcgtcaaggcgatcacgctggaggacggcgacgaagtcgtcggaatggcgcgtgtcaggaaggaaagcggcgcgacgctgctgactgtctccgaaagcggactgggccggcgtacagaggtgtcgcagtaccgtctgcaaagccgcggcggcaagggaatccgcaactattatgtcgataagaacgggccggttgcaggtgtgcgcatggtcgacgaggatgacgatgtgattatcatcaccgacgatggcgttatcatccgtattcctgtgcgtgagatcactgtacagtcgcgctatggcggcggggtgcgcgcaatgcgcgtatccgaggagagccgggttgtgaccctggcgcgcgctcccaaggaggagacttccggggatgacgggcaggaggaatcacaaatcgccgcgggggacgaagcagccggcgaaactgacaaaacggcagaggatagataa

SEQ ID NO: 1825 - DNA, 2403 bp, Anaerotruncus colihominis
atgcgaaggggcaataccccgctatgcttcttgctttcctcgcattttggcccggattcgacggtaaacgccgcgtttcgtatcggtgtccatgcggcggacggcgcaacttttgcaaaggaacggtataaaagaatggcgaagtctccaacctaccatatgaaaagccgtatggtcgtcgtgcttgtcgcgatgatcgtgctcggtttctgtgtcgtgctgcatcagttgtttgtgctccagattgtggagggcgagtcgatgcaggcgcgcgcgctccaacatcagctgcgcacaacgcgcatcggcgccaaacgcggcgtcatctacgacacaaacggcgaaaagctcgctgtcagcgccgacgtttcgtcggtctgcattgcgccaaaattggctgatacgcccgaaaaagaggaggccgtcatcgatctgctggcggaatatatcggggcggataaggaaactgtcaaaaagaagctggagcgcaaaggttcctattacgaggttgtcaaggagaaggtcgaggacgaccaggcagacgcgttgatggcagcggtcggcgaaaacggactgacgggcgttattttcctcgaggaggacacccgccgttattatccatacgggaatttcgcttcggctgtgctgggttttgccaacaatgacaaccacggtgcgtatggacttgaggcgtattatgaaaagacgctcgccgggacgccgggacgcgttgtgtcgatgaaaaacggcgcgggcgttgatatggatatgcagtatgtccagcggtatgaagcgcaggatggcaattcgcttgtgctgacgatcgacgagacaattcagcattaccttgaaaagaaccttgagattgcgctgtccgagcatcgtgtgcgcaaccgtgtgaccggcatcgtgatggatccaaagacaggcgcggtgctggcgatggcctccaagccggatttcgatccaaacaacccgtatgacatcatcgacgaaaacgtcgctaaaaagcttgaggaggagttggccgctctgccgcaggacgactcggaggaatcgcagaaggcacgccagcaggcccggatggagacgctttactcgctgtggcgcaactatgcgatttccgatccatatgagcctggctcggtctttaagattgtgacggcggccggagctttggaatgcggcgctgtgacgacgcagtcgggctttaattgcctgggctatgtgaccgtcaacggcacacagtatcactgctggtactggaccgggcaccactccggccatggagcgcaggatttgacgcatgctgtgatgaattcctgcaatccggcgttcatcgatatcggacagcgaatgggcgcgcagaatttcgcggaaaactttgcaaattttggcctgacacagccgaccggaatcgatatgccgggcgaagctggaagtatttaccacggaacctattccgtcaacgatctggcgtcctcgtcgttcggccaaacattcaaggtcacgccgattcaaatgatcacagccgcctgtgcggctatcaacggcgggcagcttatgcagccgtatgtcgtcaagcagatcatcgacagcgagggcaacgttatttcaaatacggagccggttgtcaaacggcaggtcgtttccaaggaggtttccgaggaaatggcgctgatccttgaacaggttgtcggcggaggcggatccggtaagcaggcagctattcccggctaccgtgtcggcggaaaaacggggacgtccgaacagctcgacgaccgcaaggaggatggacgtatcccgaataccctgtcgtttttcggcttcgcaccagtcgacgatccgcaggtggcgtgccttgtgctgctcgacgaccccgatatttacaacgccttcggttcaaccgtcgcggcgccgattgtcggctccattttggcggagacgctgccgtatatgggcatcgagccgcagtacaccgaggaggagcttgaaaatatcgcgacacaggcgccttatctgctcaattatgatctgcacgaagcggagtatgaggtgcgccgccgtggtctgaagttccgtgtgatcggcaacggcgcgaaggtgctcaagcaggtcccgggtgcgggagagctgattccgcaggacggcgtcatcgtgctgtataccgaggaggaaggcgcgggagaattgattccggtgcctgatgtcgtcggaaagacgctccaggaagcaaaccagtcgatcgtcggctccgggctgcagatcagcgtccagggtgaacagatcgaaggcacgcacagcgttgtttcagcacagtcgcctgacgccggcgagatggtggaggcgggcgccgtggtgacagtcgaatgcgtggcggcagagccgcccgcgcagccatag

SEQ ID NO: 1826 - DNA, 2385 bp, Anaerotruncus colihominis
atgaatatgaaaagaatcgttgcggcgctgcttgcatgtgcatgcgctttctcaatcagtgtgacatccttcgcttatgaccgcagcatcattgaccaggtcgttgacagcgacggtgaaatcgctgacacggaatacgatgcatatgccccaggcagctactattattatgtgattggaccatcaagcgattatgatatcctgacgaattctgattatctgcgtttctcaatgaagaaaaaaacaaatggcaaatacatcgacgacgccgagctgattgagaaaaaattcggcggcaaccggtatgtttgtattcaattccgtgtgaaagataattttaccgagaatgaatacaaaattgagatggaggcccagttccgcgccaaaaaggacttggtcgcgatcacatccggactatccggcagcttccccagtttccggcccgctaccagcagcgatacatctaccggcggcagcgccgtcctgacacagcttcaacgggaaaaagacgcgctcaataacaaaacgcccttctcctctccggccacaagctccgagcgcagggtcaatgagcttttgcaggcgattattgatgctgaaaacgcacttgcaaacgctgtgtccggcgcaacgccgtcctggggatccattacatcactgaccgatgcgcagctcgattcgcttctggctggtttgccgtctcaggcgagcgtcaatcaggccaatcaacaggcatcccagcaagcggccaagcgcaaggaacgcatggattatctgaatcaggagatttcccgtattgaaacggaaatccgccggcttgagacagatctctccaataagcgggccagcatcccagacagcgccgccgcgcagcaaaaggtaaatgatctgcgcaccgaactggcaaacttcaaagaacgtcaatctctgctagcagggatcagtaccgcactggcaaattatgacgccgcgccttcagaagcgaccttcaatgcgctcaaggccgccgtgcagaaatatcatccagcgcaaacctcgatgtatgacggctctgcgatcacaccgaacatgcttgacgccatcgtttacagcgcgccgctgccgccctccaacctcacgccagccacaccggttacgccgcccggaaccggcagcgacgctttcggcgacctcgacggcagcttctctgtcgactcggacgattctctggacgatggaatggaaagcgttggagatgatggggaagcggatgtcatgatgatgagcgccacaaccgctgttcttgcaaatgcaaatgcgggcaccgacgcagcccgcgacacggcgattgcaacgatccgcagcgccgtccaatctgaaacgcccgcactcacagcgatggtcaatgattacgaaacaaaccgtatccccacggcgcagcaagagatcaacagcctgcaaaataccatcgccgccgcacagcaggctgtacgtgacgcagagaacgccctggccgcttataaggccggagacggcgcaaagttggaaggctacagggccgagcttgcgcagcttcaacaacaagattcaaccgtcattcccggcacaacccttacgcaggagcaggtgcgtccgctcgtcagcagcgtcaaatccgcccgcaaagcgcggctcgatgcgatcaacgacaaacaagccgagatcgaccgcctgtccagtgtcggcggcagcacgacccccggctatctcaaatcgggagacacctattataaaaactttaaattctatatcggcaaccagcaaatcacggacgacgacgcgaccttctacgcaggagaaaagggcgtagtcatcaagccggttaaaaacgagatcaacaccgtcacctgggaaaacagcaacggttatattgcatcggtccgtttccgcgccgattcagaggtcaattactattgcccgcgcctttcgacggcctggaacaatgaggactacactgaatattttaacaaccgcgacgcctacctttacgatttcgtgggcaatccaaagctgccctgtacctcgcgcgcgacactgtcgctctataatccatacgtcgacggcaatggacgtatgaccgtcagcaaaaacaagatctatgtttatgaggtggttgacggagaactgatcgaccgttcaaacagcttctcctttggtgaaaatgacgacggtgattccgtgctgacgctccagacacgcacgcttggtacctatatcatttccgatggcaaggcgaacgtcgataaaaagaaaccttcgaacaacaacaataacaataatagcagcaataatcagaacaattccaacaagggaccaacgatcaacatcaaccagaacacgaaacctattccaaataccggaaggtaa

SEQ ID NO: 1827 - DNA, 2061 bp, Anaerotruncus colihominis
ttgaagctttttaacaatgcggtttcggcgtttgtcatcgccgtaatagctttgctgatcgtcccgcttccgacgtggctgttggactttatgttcatcgccaatctgacgatctccttcgtgatcctgctcacgaccatgtacatcagggaatcgctggaattttcgatctacccctcgatgcttctgattaccacgctgttcagactggcgctgaatgtttcctccactcgaaagattttgacgaatggcggttacgccggcgaggttgtcaaaacgttcggtgagttcgtgattcagggtgatgtagtcgttggtctggtgattttcctgatcatcgttttggttcagtttattgttatcaccaagggttccgagcgtgtcgccgaggtttccgcgcgcttcacgctcgatgcgatgcccggcaagcagatggcgattgacgccgacctcagctccggcctgatagacgaggcgcaggcgcgcatccgccgttcaaaaattcagcgtgaagccgactttttcggcgctatggacggtgctacaaagtttgttaagggcgacgcaatcatgtcgcttattacgaccctgatcaacttagttggcggcgtcatcgtcggttttgtcaccggagtcggcgattttgcacagattatggacatctattcgaccgctacggtgggcgatggattgatgtcgcagattcctgcgctgctgatttcagtggcgacaggcatgatcgttacccgttccgcatcagaatcgaaccttaacgaggatgttgccaaacagctcttttctcagccgatggtgcttattatggcttccatcgcgatgtttatgacaaccttcattggattccctaaaaagcaagtcattgtgatgtcggtgctgttgatggcgcttggtattctgcttcagcgccgcggttcgccggtggtacagccggagggggccatcgcagaagggggcgtgccggcgccggttgcagaggttacaaacgaagcttcgttttataaggatatcaacaatgtttacggcttgctcaatgtcgatcaagtctctatggaatttggttacagtttgattccgcttgttgatgaaaacagcggcggcagctttgttgatcgtgttgttatgttccgcaagcagtttgcacaggaaatgggtatggtattcccatcggtccgtttgaaggacagcgggcagctcaatccaaaccaatatgccatcaatatcaaaggtgagcaggtcgcgcagggcgaggtgcttgtcgaccattatctggcgctgataccggaaaatggggaggattctgtcgacggtattgagacagtcgagccggcctttggcatccaggcaaaatggatcagtgaggataagcgtgttcaggctgaactggccggttatacactcatcgatccgacctcagtcattattacgcatctgtcggaggtcgtcaaggcacatgcgtatgagctgttgaaccgtcaggaggtcaataatctgcttgccaatctgcgtaagacaaacgaggcgattgtcaacgatacggttccagcgattgtatcgattggcagcctgcaaaaaattctgtgcaatctcctgcgtgaagggattccgatccgtgatacggaaacaattcttgaaacgctcgctgactatggcgcgacagtcaaggatatcgacatgttgacggaatatgttcgccagtcgctgcgccgcacgattacgcatcgctttgccgaggcggggcagctcaaggtgatcagccttgacgcaaacattgaaaatcagattatgggcgctgtcaaaaaggtggagagcggctcttatcttgcgctcgatccgcagacaattcaaaatattatcactgcgacaacgcgggaaatcgacaagatcaaggatctggttcaggttcccattatccttacatcaccgattgtccgcgtctactttaaaaagctggttgatcaattctacctgaatacggtggtgctgtctttcagcgaaattgattccgacgcaaaaatacaggcgttgggcaatatcacgatttaa

SEQ ID NO: 1828 - DNA, 2619 bp, Anaerotruncus colihominis
atgatggaggaataccagggactgacggcccggcaggccgaaaaacgccttttggagcatggggaaaataagatcagaagcggcaaaaaagcaagtgcgcttaaattgttcgcaggtcagttccgcgacgccatgattatgattctcttggcagcaaccgtcgtttccgcactgatgggcgaatatacagaagcgatgaccatcattgcaatcgtatttgtaaatgcacttctcggattctttcaggaatatcgcacagaacgaacgcttgaaaagcttggggaactgtctgctccaaatgcagccgtaatccgcgacggacaaatccaaagtataccggccagcatggttgtacctggcgatatattttgtctaaaggctggcgaccggattcccgccgacggttgtgtgcttggcggcgatagtttaagctgcgatgaatccatgctcagcggtgaatcaatcggggttgaaaaatatgcggccccaaatcccgatgcgccgcagaaggctaatcgtgtctatatgggggctacagtgacgcgcgggcgcgccgtttgccgcgcaaccgaaacgggtggggcgactgaaatgggcaaaattgcagatatgcttggcaccatagaggtacagccaacgccgctgcaaaaacggctcgcacatatggggaaaataatcggaatcgcctgtttagtgatctgtcttgttgttgcagtgactggtattttacgcggcgaagatcccttcaacatgctgctcaccggaatttcccttgccgtcgccgcaatcccggagggacttcccgctgtcgttaccatcgcgcttgcgctttctgtcggacgcatggtcaagcgcaaagccttgattcgccgtctgcatgcggtcgaaacgcttggctgcgccgatgtcatctgctctgataaaaccggtaccctgacagaaaaccgtatgactgttaaggtcctctggaccgcctccggcgaaacagaaattgggaaacgcgcctccagcgagccttgttcagctatgctccttgatatcgctgttctttgcaacaatgccctgctcgataccccggcaggccgaaaggacgcctttacgacggatggcgagccgacagaagcagccctgctcatcgcagcggccaaatcgggcgttttcaaaaaacagcttccttatgagccagttaaagagcttccttttgattcggcgcgtaaaatgatgagcgtctgtgtgcggcgtaaggatgggaaatatcttttgttcacaaagggagctcccgatctcctgctggaccggtgtacgcattatctgtccaaaaacggcgtttcacttctcaccccagccataaaatcacagatttctcaacaaaacgatgcgctcgcacggcgcgcgctgcgtgtactcggcttcgcttatcgcgaggccgacagcgcaggcgatatacgggaggaacgtctgatcttcactggtatggctggaatgatcgatccgccacgcaaagaagccttcgatgcggttataaaatgccgtgaagccgggatccgcccagttatgattacaggcgatcatgcggttacagcacgggccattgctgaggagctgacgatttatcagcctggcgaccggattatgaccggccgtgaactcgataaaacaagcgatgaagcacttacgcgtatgatttccaatatttctgtatttgcacgcgttacaccggcccataagctgcggatcgtgcgtgcgcttaaaaaacaggggcacactgttgcaatgacaggcgacggcgtcaacgatgcgccggctgtcaaggaagctgatatcggtgtttctatgggaatcactggcacagatgttaccaaggaggcttcatctgtcatattgctcgacgacaactttgcaacccttgtcgcagcagtcgaggaagggcgcgtaatttaccggaatatccgcaaattcattcgatatctgttttcctgcaacatcggcgaggttgtaaccatgttctttgccatgctgatgggaatgccggtaccgctcctgcccattcagatcttgcttgtcaatctcgccacagatggcctgcctgccattgcgcttggtctggaaccgcctgataaggatgtgatgcggcagcgtccacgccgtgccaatgaatccgtcttttccaatgggcttggattcacgatcgtgattcgaggactattgatcggcttatgcacacttggcgtatttgtttccctgatccgttccagtggagatcttttgaccgcccgtaccggcgcgctgcttgcacttgtcttaatgcaattgattcatgtttttgaatgcaaaagcgaaaccaaagggttgttttccatcaaccctctgaataatcttaaattggttggcgcagtggctgtatcggcaattttaatgtatttggctatctacaaccctgtattgggcagtattttccgtgcggttcctctaactggggagcaactgcgcactgttttgacctactgtgtgtttgtcccaattgtttcaggtattattctgatgatcaaaaacagggcctcaacgcataccgtctcctcaaaatcgtcccataaaacgtgtccccatccagttaaatag

SEQ ID NO: 1829 - DNA, 2238 bp, Anaerotruncus colihominis
atggcagcaaaacgccaaaagaaagaaccaaaaaaaagcgtgaacacgtcggcggtcattgaaaacgccggcgttctgatcgagcagccgattgtatcgacgcttgaggaaaattatatgccttatgcgatgagcgtcatcgtttcgcgcgccatcccggagatcgacggctttaagccctcgcaccgcaagctgctgtacacgatgtataagatgggcctgcttaccggagcgcgcaccaagtcggccaacgtcgtcggcgcgacaatgaagctcaatccccacggcgaccaggcgatctatgagacgcttgtgcgcctgtcgcgcggctgcgaggcgcttttgcatccgtatgtcgacagcaagggcaatttcggcaaggcgtacagccgcgatatggcctacgcagcctcgcgttacacggaggtcaagctcgacccgattgcgaacgagctgttccgggacatcgacgaggacaccgtcgatatggtcgataactacgacaatacgatgaaggaaccgacgctgtttccagtgacattcccatcggtgcttgtcaactccaacatcggaatcgccgtcggcatggccagttcgatctgcccgtttaatctcgcggaggtctgcgaaacgacgatcgcggtgctcaaaaatccggagcatgacctgcttgagacgctgcacgcgcccgattttccgggcggcggctatatcgtctatgacgagcaggcgcttcgccggatttacgacacagggcgcggaggcatccgcgtgcgcgcgcgctatacgtatgaccgcgccaacaattgtatcgacgttacggaaatcccgccgactgcaaccgtcgaagccattatggacaaggtggtcgacctggtgaaagcgggcaagatccgcgagatcgcggatatgcgcgacgagacggatttgaacgggctgaaactgacttttgatctcaagcggggcgtcgaccccgaccgcctgatgcagcggctctttaagctgacgccgctggaggattcgttctcctgcaactttaacgtcctgatcggcgggatgccgcgcgtgtgcggcgtgcgcacgctgatcgaggagtgggcggcgtttcgaagcgaatgcgtgcggcggcgcgtgttccgccagttgaacaaaaaaaaggaaaagctgcatctgctggaaggcttgtccaggattttgcttgatattgacaaggccgtccggattgtgcgggagacgcaggaggaacgcgaggtcgtgccgaacctgatgatcggatttggcatcgacgaggtgcaggccgagtacgtcgcggaaatccgcctgcgccagctcaaccgcgagcatatcctcaagcgcactgaggagatcggccagcttcgcgacgacatcgcggagatggagtcaattctggagcaccgcgaaaaaatacgcgccatcatcatttccgagctggagaatgtgggaaagaaatacgccaaaccgcgccgcagtctgctttactatccaacggagggcgaggatgaagcgggagaggagccggcgcccgattatgcggtccatctgttctttacgcgcgagggctattttaaaaagatcacgccgcaatcgctgcgtatgagcggcgagcataagctcaaagagggcgacacggttacgcaggcggtggaggcgaccaacaacagcgaccttttgttcttcaccgaccgcggtcaggtctacaaggccaaggcgagcgattttgacgatacaaaggcaagtgtgatgggcgattatatcccggcgcgccttggtatggacgaaggtgaaagcgccgtttatatggcggtgacggcggattacgccgggtatatgctgtttgtttttcaaaatggtaaggccgctaaggtcgatctggctggatacgcgacaaaaacgaaccgcaaaaagcttgtcggcgcctacagcacagcgtcgccgctggccggcattttccagttggcgcaggacgctgagtaccttttgacctcgtcggccgggcgcatgctgatcgtgcacacgggcgcggtcgccgtcaagacaacgcggtcgacacagggcgtcgccgtgatgacgcttaagaaaaataatttcgtcgagcgggtgcgcccgtttgaggaggggatggtagcaaatccccatcggttccgtacaaagacgctgccggcagccggcgcgctgcctcgcgcggaggacgccggggagcagctcacgctcggataa

SEQ ID NO: 1830 - DNA, 2634 bp, Anaerotruncus colihominis
atggctccaatgacccggtctgaaccaaaaggttccctgaccatttttgccggttatgcgccgggatcaggaaaaacctacgccatgcttgaggccgccgagcgcgccaggcaggcgggggcagtggttgtcagcggacttgtcgccgcgaacggctggccgcaaacacagttaatggcagatcgttttgagactttgccgtgcaagcaaattcagcagggaacgcctgcatctatggaaattgatttggacgccgcgctgcacagaatgccgcaattgattctgatcgacgatttatctcatcagaacccggacggctgccggcataaaaaacgatatcaggatatcgaggagcttttaaaggcaggaatcgatgtctataccacattggatattcaacatatcgaaagccttcaggacaccgtctcagccatcattgggcatggtctgcctgaacgggtgcccgatagtgtgtttgacgctgccgaccgggttgaatttgcggatctggagccgcaggatctgctcgatcgtctgaaagcgaagcagcccggtgctttatcttcccccttatccattacacagttgaacgcccttcgagaattaggtctgcgccgctgtgcggaccggattgcgctgcaaactcgcaaagcacagaagcaagcaggataccggacccatgaacacattctcgtctgtctgtcctctgcaccctctaacgccaagatcatacgtaccgccgcacggatggccggcgcctttcgatgcggctttacagcgttgtttgtggaaacaaaacagttccagtggagctttcaggccgacaaagacagactgcggtccaatatccgtttggccgaacagttaggcgcgtccgtcgaaactgtatatggcgacgatatcccctatcagatcgcggaatttgcacgtttatccggtgtgacaaagatcatgatcgggcgcagcgggatatcccgccgaaccattttccgcgcgccttcgttgacagaacggctgatcgagcttgctccagaactggatattcatatcattcccgacaatggactcaacaagcgttctgcgcctgcctacagggaaccgatgcggcttttatccgtttccctgtgtgatcttgtaaaaagcgtgctgctgttgcttctggcgacccttgtcggctttctgtttttcaagcttggctttactgaagccaatatcattaccatttatatcctcagcgtcatgctgatctctgtgaccacaaaaagccctgtatgcagctttatttcatcagccgccagcgttcttattttcaactttttctttacggaaccgcgatattctctgcacgcatatgacagcggctatctggtcacatttctggtcatgtttatcgcggcgctcatcaccggctccttagcgtcaaagctgaagtcccacgcacagagagccgcacaggttgcctggcgcacgaaactcttgtttgaaacgaatcagagtttgcaaaaggctgtggatcaatcggaaatcatggccataaccgcacggcagctggtcagactttttcaaagggatatcgttgtataccgcgctgaaaacggtgttttgtcacaaccggtccttttttgcaccgccgatgagggctgctctgatacaccgtataccagcgcaaaggaacaagcggtcgcacagtgggttatgaaaaataaccggcgcgccggtactgggactgaaaccttttctgattccctctgcgtctattggtctgtacgaatcggcgatcgggtatatggcgtgattggaatagcggcaaaagcaaagccgttggattcttttgaaaacggcattttgctctccgttttgggggagtgcgctttggcgctggaaaaccagaagaacgcgcaggaaaaggaagccgcggctgttttggcaaaaaatgaacagctgcgggccaatctgctgcgctccatctcccacgatctgcgtacacccctcaccgccatatcggggaatgcaagcaatcttctttccaatggcaagctgtttgacgcacagaccaaagaacaaatgtatacggacatatacgatgacgcgatgtggctgatcaatctggtggaaaatcttttgtccgtcagcaggctggaagaagggcgtatgaacttgcatatgtccacagaactcatggatgaagtaattgcagaggcgctgcgccatatcaaccgcaaaagcgcggactaccatctgatcgtccgcgaacctgatgaatacattttggttcaaatcgatgtgaggcttatcgtccaggtactcatcaatatcatcgataacgcgataaaatatacgccggtaggttccgatatccgtatcgagtggaaaaagcagggggattttgtccttgtttccatcgcggacaatggtcccggcatttccgctgaagcaaagccgcatatattcgaaatgttttacagcgcctccgccaaaatcgcggacagccgccgcagcatggggctggggctggcgctgtgtaaatcgattgtaaatgcgcatggaggagaaatcagcgttgcggaccaaattccgcatgggacaatctttacattttcaataccatccggggaggttgaactgcatgaataa

SEQ ID NO: 1831 - DNA, 1836 bp, Anaerotruncus colihominis
atgaaatacaatccgtataaattatcaaagcatggccggtatcaataccgatacagccctgtaaacaagccggagacgctgcgtactcccgatcccggagaggagcgggcggattattatgaacgcctgcggcgaaaattcacaccggagcagcttcggcgtctcggctggaccaatatcgctgtgatcggctgcgcgctggccttattttttctcgcctcgctgtttgtggaaaagcccgttcgttctgtgattgaaaagcgtgacctcgcgcgtttcccggctgtttcgtccaaggcgcttttttcgggttccttgacgcgcgatgtggaaacctggtatgccgacacgttccctctgcgcgatgcgtttgtcggtttgtcggctgttgtggacgaagcgcacggcgtgcgctttgacgacgtgcgcatcgttgccccgtccggcggtgagacgcaggatatcccgcccgacgcttcgaccaacaccccggttcagccggcgcagccgcgcgccggacaacagaacgcggccgtttccagcgaggacgcttcgtccggtcaggatgagcaggcggagccgtttgtgccgcaggtcgacccggatcacgatcatgcggtgatcgacgacggcatgggaccgggtgcgatcaacaacggcacgtttgtgtataaagggatggctatgtcgctgttcgggggcctgcgtgaaaacggcgcatggtacgccgagacaatcaaccgctatcaagatgagctgcctggcgtgcgcatttacgatatggtgatcccgacggcaatcgaattttatgtgccggacaaataccgcgatttgacgcagtcgcaaaaggagatgatcgattatatctatagccggctcgatccaaagatcaagcgggtggatgcatattcacagcttcaaaagcattctgatgagtatatttatttccgtacggaccatcattggacagggcttggcgcgtattatgcatatgtcgctttctgtgagcaggccggcatcatgccgctgcaaatcagcgactttgagacgcggcgtctcgatgatttcataggaaccatgtacgcgcagacacaggatacgaccttgctcaagcatccggactacgtcgattactatattttcgaccagccctatacagccgagcggtatgaccgcggcgcaccgtatacgccggttgactggacgctttggggcgaatatgcaaaaagcccgaacagctattccgtgttcctgcacggcgattttccgcttgtcaaggtgaaaacaggcatcggcaacggccgcaggattatggtcgtcaaggaatcatttggcaatgcgttcgcaccgtttctgatcaatcattatgacgaagtgtatattgtcgatcagcgttattttgagcttggcgcaattgattttatcaagcaaaacggcatcaatgagctgatctttgcaaacaattcgttcgcggcctgcacgccgtatcatattcagtgtatcgataacatgcgccatcaagctatttatgacgcgccgcctgcacagacgccgtctgaggaagtcctgccggagacgccgtccgggtccatgccggaagtgcaggagcctcagacgccggagtactcctctgtgccggaggaaccggagcaatcctctgccccgcagacgcccccggctgtgccggaggcgccatacatacctccgcagacatatgtgccgccgcaggagccgtctgcatccgaaccggaggcggattcgcaggaggacgagctgtatgagcaaatggatgatatcgagcggtcgcgccgcctgcgcgcccgaaacgaaaaataa

SEQ ID NO: 1832 - DNA, 3933 bp, Anaerotruncus colihominis
atgcaggagggattttgcgtgatcgctgaaatcataggcgtgggggcggtttccgaaggagggcaggaccttacgtcaaatgccgcgctgatcgcccgcgagcttgaaacctgcggcatttcagccggtccatgtacactggccgacggggcgcagcagcttcgcggcgcaatcgccaaggcgcttgggcgcagcgacatcgtgattattatgggagggcttggtccaggaccggatgggatcgccaagcaggtcgtctgcgacggcctggggcgaaagcttgtcatgcacgatgcaagcctgcgccgtatccgcgcggcgtacgagcgcgcggggcggcagatgccgcagcaggtgtcgcggctggctatgatgccggaacagtcggtcgtttttccgggcgtgcgcggcgtcacaccgggctgcgcgctgtcggcaggcaatcagtttatcattctgattccagacgatccgcgcgaatttgtgccgatgcttcagcacagcgtaatgccgtacctggccaagttttccgaggcggctgtcgtgacgcgtaccataaacgtgttcggacccgacgaggcacagatgcgcgagcagctcggtgcgattttaagctcgcagaacccgacggtggccgtttatccaaagcgcggagaatatcaggtgcgcgtaacggcgcgcgccaagaataaaagcgcggctgccgccttgtgcgagccggtcgtccgcgagattacgcgccggcttggggaggcggcttacggcgtcgacgcccaaggcctgtccgccgaggcggctgatgcgctgcgcggcgcggggcttgccgtttcgatcgccgaatccggtacgggcagcctgcttggcgaaatgcttaaagcagctccggaggtgttggcctactgtgtgtcggccggttcggatcgcatcaagacggagacgctcggcgtttccgacaagctgcttaaaaaatatggctcggccagcgcccaggcggccgccgcgatggcggccggcgcgttggagcagggccgttcggcgatcggcgtggctgtcgcggcgggcgcgccggatcagaaaaagcagcgcgatgcgtttgccgcgctgacggatgggcagcatgtttggatacgccgcgtgccggcgcgtgacaatgaatccgccgaagcggcgcgtgcgcgcgcctgcctttcggcgctcgacctgatacggctgtacataaccgctttaccgcagcaatatcgcggcgccaattcgttgcaggcggtattgtccggaaagactgtcgagctgctcgcaacagaggaggggcagaccgtatccggaaaaggagatgacgccgtggcaaagaagaaaaggggaattcttgcgcggatttttccgtgtaaaggcgacagtgccgccgatgttgtacgcaagatgatcttgatcgtcgctgtctgtgtgttcatcgcatcagccagttacctgctgctgttttacggcgaatcggcgcgcaaccgcaaggaagccgccggatgggccgatgcatacaatacggcgcttggattggacgacactgacattgatgtgccggagggttatccacagggatatcagctcaagtttgccaatctttataagatcaatgaggatatagccggctggctgtcaatcgccggtacacaggtcaattatccggtggtccattatcaggacaacgaatattacctgcggcgcgactttaacggcaacgacagcaaatacggtacgccatggctcgaggcgaacgattcgctcgatccacagagcgacaattatatcatctatgcccacaatatgaccgacgggcagatgttcggcgagctgatgcagtacaagggcgcgaccggcacaaaggattttgcaaatcccgatgccggtattgaatatctgcgtgagcatccgattatctcgtttgacgacgtttaccgtgacaacgattataaaatcgtttcggtgtttatcaccaatgcaaaggaagcatatggtccgatgttctattataacgattatctcgatctgtcggaccctgaacgctttaacacctttgtcgacgagatcacagcgcgctcttattataattccaacgtcgatatcaagcagggcgaccagtttttgatgctctcgacatgctcgtatgaatacgggcctgtctccgacgacgcgcatgtgcgtaccgtcgttgtcggccgccgtgtgcgcgacggcgaaaaaaatgacggctccgatatcgagtacaccgtcaatccgtccccgcgtatgcccgagggcttcgccggcggaaagccttcggctgatgtgattgcgcaggccaatgcagagcaggggaccggccttgttcccggtccgacaacgccggccggcggcgcttcgacagccgccccggccgcttccgcggccacaggggcttcgtcggttccagtttcccagccgcaggagtcctctgcatcggccgcgtcctctgtgccggatacggagctgaacgattacgagtatgaggcccgccagctcgcggcggacgcgcaggccgccgagcagcgcgcgcgtgacgcgcgggatacggccaggcagtccgcacgcgaggctgaacgcagcggcacttccgcttcacaggcacgcagagaggcgggccgcgcagaggaagcggcctccagcgcggcgcggtattgggaaacggcggacgacgcagcctatgaggccgagcagatttataatgaatatgaatcggctgtgacacgcgaagcttacgaaacagccgccgcggccgcgaaatcggcgcgcaattaccgcgatgaggcggaggaatatgcggctgacgcgcgctatgcggccgacgagaaagcgccggaatccagctcgcagccagcgtcctccagtcaggcgccatcctcaagcgcgccgcaaacctcctccagtcaggcgccgtcctcgagtgctccgccgtcctcgagcgaaccgaaaccatcttcaagcgagcctgaaccgtcctcaagcgcaccggagtcttcctcaagtgaggaggaggatctgctcgaaccgtcgagtgtcgcgtcaggaaacaacaatctaacggtgaacgatgcggataaaactggggatgaatccacaaccgacgagacagacgtactttcggcatattcctcaaaggagaaactgaccgtagtctcgggcggcaaaaagacgaccggcaaagcgcgcgatattgtagcgcaggttgttatgactgaaatggggacaggcttcaacgaggaggcgctcaaggcgcaggctgtcgccgcctatacatatattaagcagcagaatgcgaacggcgtcacgccgtatcttggattgcgcagcccttcctccgatgtggaggaggcggttgacgaggtgatcggcgaggcggtttattataaaggcagcattgcctttacaccgttttatgcgacaagcgcaggcgttaccgcggcctcggccgatgtttggggcggcagctacccatacctcgtttcagttgacagtgaaatcgatgaacaggcgcgtaattatgaggttattacaaccatgggcgccgataaggtagcggatcgtattgacgatgcgtttggtgtggatctgtatgattacagcgacgatccgaacgactggttcgatatccgaagctataccgagggcggccgctatgtagatgttatttatgtcggcgacaaaaagacgaccggacgtgctgtacgcgaacaggcactaggcttgcgttcagccgcgtttgaaatcgattatgatgctgacagcgatgaatttaccttcactacctacggctatggccatggcgtcggcatgagccagacaggggcaaacctctatgcaaacgaggagggatgggattatattgaaatccttgagcactattaccccggatgccgtgtgcgctga

SEQ ID NO: 1833 - DNA, 2466 bp, Anaerotruncus colihominis
atgatgaacggttttttgaaacgggccgccgcatgtatgctggcggtttctatgcttgtactcagcgcatgctccggcggtatgcagccgggcggcagcagtctgccggacggaagcggcgacggcgtcgccatgggacgttacatagaggaggagcatgcggcgccggatggcgccggttatatatcaggcatgaccaggatggcggacggtacattggagatggtctgcaatctcgatgccggacggatgctcggcccatggtatctgtttgcctcctccgacaatggggcgcattggacacaaaagcaaattgcctggccggaggagttgaacacagagctttcaaacatgcagtttgcggcttgggataaccagggcggtatgtacctttattattcgacgtttacgcaggaacagctcgacgcgatgatgagcggcgctggttccgatgagacagtagccgcgccggcggaggaagaacaggagcaggcatcctccgaggacgtaccggccgcagacacgcagggcgggcaggaggatgccattgaaacgcaggagcagcttgcacaggacaatttcctctatattgcaccggacggaactatacgcacgattgactgggaattgcccacggatgatagcggtgcaggtccgatcggcctgcaagtggcggaaaacggagatctgctgataaactgttatttcagcatcgtccaggtcgaccccgagacaggcgcggtgaaaaaccgttatctggaggaatcattttcacaaaacttctcctatatcagttataaagatacgcttgctgtttcggagggcgggccggaaatcgatctatacgatctgcagacaggagaaaaaactgggagtatctccgcttccgctgatgtaaacgacgtttcgacgcgcggttcatttatggttgccggagatagcagcgtgacaagggcgatggcgcttgatccggacggggaggcgctctggtttgccgacaaaacgggcatttaccgccacgtactaggcggttccgtgacagaaaagcttgtcgacggcgaactgtgctcattgaccatgccgtcatattcgatgcataatttgatcgtctgcgacgatggaagcctgcttgcaatgctttatggtgatgcaggggaatggccgctgttccattatacctattccgccgatacgccaaccgttccatcgaccgaactgcgtgtcttttcgctctatgaaaacgcgacggttcgccaggcgatgggcgtgtatcagcgtcaaaatcccgatgtacgcgtcagctacgaggtggcgctcggcgatgacagcgccgtaacggaatcagatgcaatgcgcacgctttccacagagctgttggccggcgaaggtcccgacgttttaatcctggacgggatgcctgttgaatcttatattgaaaaaggagtgctgcttgaccttgcgcctgtctatgatgaacgtatcgcatccggggggcttttgaaaaatgtcgcggaaagctaccggcagacagacaaatcgctgccggcaatccccgcacgtttcggcgcgccgctgatgctggcggacgacggcgtcaatccaaagaatcttaccgaacttgtcgattggctgatcgcgcgggagggcgcgctggactccagccggatcagcggcgttctgtccaatctcagccccaattctttgttgccggtgttctatccggtttgctcgcctgcatggtacagtgaggatggtacggtgcgcacggaacagctgcgcgcgttcctgtcagaccttaagcgcctgacggatttggaacacgatccggagcagttggaggaaacggacatggtttatatatccagccctgttgacttcaaatgggacggcatcagatgggcttacaacaatctggcggcgtcaattggagaggtgctgtccgtggcggacatcgcttatccggatgcatatatccggcataaaggacaagggcatttgattcctctgccgggtcaggcgcagaatgtctttattccgcgcacggtactcggtgtgaacgcctccggcaaacagcaggatcgtgcgctttcctttgtcgatcttcttttgtcccagcagattcagcagaatgactttggcgatgggatgccggtcaatgcggaggtattctcaatggcgcaggaggacccgtatcaaccctatgacgatggaatgtatcttgcaacgtcctacaccgatggcgagaatgtggatgtgactatggaaatggcggtgcgttggccgtccgaagcatttatgaaggagacggccgctatgctggagggacttgatacgccgtcgccgtctaacgcggtcattgagcaaatgctgacagacgaaacaaaggattacttcgcaggcaaaaaatcgctcgatgagacggtcggctccctggcgcaaaaactgaacctgtatctttctgaataa

SEQ ID NO: 1834 - DNA, 2367 bp, Anaerotruncus colihominis
atggaacaatcattgtcagaacgttttttatccgtcaggcggcgcatcatcgacgatttttttatccaaatgaatccaatgcagcgccaggcggtttatgcggttgacggaccggtgttgattcttgccggcgcgggcagcggaaagacgaccgtaatcatcaaccgcattgcaaatatgattcaatttggcgacgcatatacaagtgcacatgttccggagcatttgaccgaggatgacgttgtgtttttggaggaatatgctgccggtgaaagctgggatatggaccgtgctttttcattgattcgaaaccggacggttatgccctggaatattcttgccattacttttacaaacaaagcggccggggagctgcgcgaccgtcttgctgcgatgttgggatccgtggcctcggatgtcaatgcatcgacctttcattcggcgtgtgtgcgtattctacgccgtgagattgagcggatcggatatggccggagctttgcaatctatgatacagacgattcgatacgcttgattaaagcggctctcaaagagctgaatgtggacgagaaacgtttttctccaaggtctatcctgtcagaaattggacgcgcaaaagatgaactgcgcacaccggccgattttgcagcgactgtgggggaggactatcgtctccaggtcgtctccaaagtttatgagcggtatcagcgtcagcttgaaaacgccaatgccgtcgattttgacgatatcattatgctgacggtgcgggtgttccagcaatatccggatgcgctggagacgtatcgccgccgttaccgctatgtgatggtcgacgagtatcaggatacgaatcatgcccaatttgagctggtgcgcctgctcgcttctgaaagcgggaatctgtgtgtcgttggtgatgacgatcaaagtatttacaaattccgcggcgcgacaattgagaatattttgcagttcgaggatacgtttccgggcgcgcgcgtgttccgtctcgagcagaactaccgcagtacaggtacgatccttgacgcggctaacgcggtgattgagcacaatacagcccgaaagggaaagacgctctggacacaaaatgatacaggcggcaaggtgcgcgtctatcgcgcggcggatgaaggcgaggaggcgcgctttctctgcgataccattcaggagaatgttaaaaatggcgcgcgctatgccgatcatgtggtgctttaccgcatgaacgcccaatcacaggcgattgagcgcggtctgaccaaagctgcgattccctatagaatcattgggggactgcgattttatgagcgcaaggaaattaaggatgtcgtcgcttatttaagcgtcattaacaaccaggccgatacgctgcgccttcgccgcattatcaacgagccaaaacgaaaaatcggcgaaagcaccattgcggctgttgcagagcttgcggcgggcgaggggaaaaccgtatttgatgtgttggcccatgccgatgaatatgcatcgcttggacgcaaggcacaggatttgatgtcctttgcctcaatgattcaaaagctggtcgatttggcagacaaggttttgcttgatgagcttctggatactctgcttgaggaaacagggtatctgcgtatgcttcaggcacaagggcctgaaggacaggcgcgtattgaaaatattgaggaattaaagtccacgatgcatcgttatgaggaggaaacagacgagccgtccttatctggctttctggaggagatatcgctttacacggatttggacaactacgattctgccgctgatatggtggtattgatgaccatgcactccgctaaagggcttgaatttgattatgtatttgtagtcggcgctgaggaagggctttttccggggatgcaggcgatgaacaatcccgaacagattgaggaggagcgcaggcttgcatatgtctcgatcacgcgtgcaaaaaagcagctttatatctcgacagcggcgcagaggatgctgtttggccagacaatgcgaaaccgtccgtcacgctttttgggcgaggtgccgcagcagttgtgcgaggtgacggaccaaacggttctgcggcggcagatggtggaaaatctgccgtcgcgccgcccgcgcatgacgcaggcggacagaatgctcggcgtgggctatgcaccggctgcacaggcgggcgaatgcgattggaagcctggcgatccggttgtgcataaggtgtttggacctggcatggttttgtctgttacgccgatgggtaacgatcagcttgtcgaagtagcgttcgaatctgtcggaacaaagaaggttatggcgaaattcgcgcgattgcgcaggaattaa

SEQ ID NO: 1835 - DNA, 2937 bp, Anaerotruncus colihominis
gtgaaacagtttccagtgctcgacagccggaccaaacaggatctgctcgcccagattgccgcgcgggcgcgccggtatacgcccgaatggcgcctggattttgagcagcctgacgcaggagcggcgcttgccgaactctttggcggtatgctttatgagacgatctgccggtacaaccggattccatataaacagttcctttattttctgaatatgctcgatacccgccgcacccccgccacgccagccgtgggctatgcgcgcttttcctgtgagacgcccgacgcgcgcggcgcacacgtggagaaaggtacgcagctttatgcacagagcggcggcggggaggatgtcctctatgaaaccgacagcggattcgacgcgtcggccgccgtgctggaaggcctgcttctggtacatccgcaggcggattgtatcgaatggtacgacgccctttccggcgatgcggccgagctgttcggggcgcatcccgaacgcaatttgcaaagccatatcctctatctggggcatccggatctgtttttgctgcacacgccgtgcatggtggaggtggagctgcatacagatgtggagcttctgagcgggcaggctgcggaacagcttgcacagccgcaatccgccaaatgggagtattatgacggcgcgcgctggagcgcctttgaccatgcagaggcgcggcagaaaaccatactgctgcaaaagaccgccgacggcccgatggaagcgcaaggggctgacgccccggcctgcatccgctgcgtgatgcagggagcgcagccggagattcgcctgcgcgcggcgcggctgcgtacaagcccgctaagggacgctgcgctcgaagcggaggaacttttttataacgaccttccgatcgaccgcgcgcttggcggctattgctttgggcgggaacccgtgccttacgactgtttttatctggccagcggcgaggcgttttccaaacgcggggcgcggctgaagattgagctggagatgcgtaccgtcgtggtgcagcagatgactccggaccagcggtatgaattcaataaaaaatatatcatcgataaaaacgaccggctcacatcggtgccggaaatctacatttcacaggtgatatgggaatactggaacggcgcgggctggaaacggctttttgtggagggcgacgccaatccgttcgcctgccgcagagagggacggatggagcttagctgcgtctgccccgcggatatggagccggtgactgtgggcgcggtagaaaattattggctgcgcgcccgcgtgggatttgtggaaaacaatttcagcacgaccggcgaccgtctgcttccatttgtacagggagtccggctgcaatatgcctatgacgagacgcagccggcccattatgtgcggtcggacaacaactgtgaaagccagatacttgccgacgcgcaccggctggaaaatcttgctctggacgcgtttgagagtccggagcagacgccgccggctgtctacctctgttttgaccggccgttctgcggctatccggtcaacctgttcttcgatctggatggacagtgcgaaggaattgacagactggaggtgcaggcgcttttggcggatggctttcaaaaggtaaatgccgccgaccggaccgacggcctttcgggcagcggcatcctgagcgtctatctgggggagccgcccgcgcgcggccgtctgtttggacacgaggggtattttctgcgtatcctgggggagcgccgcgcgcgcaggggggcgctgccccgtgtgacgcgtgttttgacaaacgtggcgggcattacgcagtcgcaccgggagcttgaccagctctttgcggccgatattcacgagaccgggcgtgaaatcgttctgccgcacaggcccgtgctttcctgcgaggtttgggtagacgagctgcccgagctgccgcagcaggagcgcgatcgtctcctggacgatcccaaagcgcccatacgtcccgagtatgatgaggaaggcgcgctgatccgcctgcgggtgcgctgggaggaaaccgacagcttttcagggaccggaccggaaagccgcgtctatcagatcgaccggatcgaagggcggctcacctttggaaacggccggcgcggcaaagtgccggccgccggtgaggagagcatccttgtgcaatattcatcaggcggaggcagccgcgggaacctgcccgcagggcgcatcggcggcatggtcggttcaatcgcttacataaccggcgtaacaaatataacgcccacctgcggcggcagcgatttgcagacgatggaagcggttgaacgcctgggtccgcgccgcgtccgtcaccgctaccgggcggtctgcgcccgcgattacgaggacctgatcggcgaacagttcggagaggtggtgcaggttaaatgcttttccaataccggtgcggacggccggcctgctccgggagctgtcacggttgtggtgatggcacgcgattttaataaccgcgattatgtgctgcgcctgtgcagacggatccgtgcgatgctggagaattgctgcgactgcatggcgctggaacgtcttgcggtgatcccggcggtggttatgacagtaaacgtcaccgttcatctgatgccggacgacctcgactatgccgcgcaggttgagcgcgatgcggtcgccgcgatcaggcggctgcttgaaccgtcggatgggcgcggcctgatccgcggaatcggggaactgccggccgccgccgatttttacagcaggctcaagtatgtcgagcatgtggcggcggtgcgcgacgtctttttggagggcgactattatgaggatggccgccgccggcttgtcagcctggacgggtcggtgtcggtgccgtttacggtggtacaggggggaacccacagggttcggatgtaa

SEQ ID NO: 1836 - DNA, 1908 bp, Anaerotruncus colihominis
atgatgataaatgtaacgttaaaagatggcgttgtcaagcagtacgagcagggcacgacagccgcggaggttgcaaagagccttggcgcgggactttataaagccgcctgcgccgcaaaggtggacggcaaagccgtcgacctgcgcacgccgcttgagagcgactgtacgctttcgatcctgacctttgatgcacccgagggcaagcacgcgttttggcacacggcttcgcatgtgttggcacaggctgtcatgcgcctgtatcccgatacaaagtacacgattggaccggctgttgaaaacggcttctattacgatttcgacgtcgaaaagccctttacgcccgaggatctggccgctattgaaaaggagatggcagccattgtgaaatcaggcgtggagcttgaccgcttcgagcttgacgcgccgcaggcgcgcgagctgatgaaggaccagccgtacaagctcgagctgatcgataagcacgcggcaagcggcgagaaggtcagcttttaccgtcagaacgatttcaccgacctctgcgccggtccgcatctgatgaacgtcgcgccgctcaaggcaatcaagctgctccaaagcacaggcgcctattggcatggcgacagcagcaacaagatgctctgccgcgtatacggcattgccttccccaaggcgagcgagttaagcgactatctgcacatgctcgaggaggccaagcgccgcgaccaccgcaagcttgggcgagagcttgatctatttgatatctatgaggaagggcctggtttcccattcttcttccccaaaggcatgatcctgcgcaatctcctggagagcttctggcgcgaggagcatcaaaagcacggttatcaggagatccgcacgccgctcatcctcaatgaggagctgtggcaccgctccggtcactgggatcattataaggacaatatgtatacgacgaagattgacgaccgtgactatgcgatcaagccgatgaactgtccgggcggtattctggtctataagcgccgcatgaattcctaccgcgatctgccgcagcgtcttgcggagcttggcattgtgcaccggcatgagctttccggcgcgctgcacggtctgatgcgtgtgcgctgcttcacccaggatgacgcgcatatctttatgacgcccgatcagattgaggcggaagttctcggcgttatcaatctgatcgacagcatctacagggtgtttggcttcgactatttcctggagctgtccacgcgtccggaggattcgatggggagcgaggagcagtgggagacggctacggccgccctgcgcaaagccctggaggacaacggcaggccgtacacagtcaacgagggcgacggcgcgttttatggccccaagatcgattttcacctgcgcgattctatcggacgcacctggcagtgcggtacgattcagcttgatttccagatgccggaacggtttgatctggcctatatcggcagcgacggcgaacgccatcgcccagtcatggtgcaccgcaccgcatttggaagcatcgaacgctttatcggtatcctgattgagcattatgccggcgcgttcccgttgtggctcgcacccgtgcagatcaaagtgctgccggtaacggacgagcatatcccttatgcgcagagcgtagccgataccttgacaagggccggcctgcgcatcgagctggacagccgcaatgaaaaggtgggctaccgtatccgtgaagcgcagctccagaagataccgtatatgctggtgctcggcggcaaggaggctgaaagcggcgaagtcgcagtgcgtgaccgccgcgatggcaagacgacgacgatgctgttggcggactttgtggagaagatgaaaacagaggtcgagacaaaggcgaactaa

SEQ ID NO: 1837 - DNA, 1902 bp, Anaerotruncus colihominis
atgaatataactaaaggcgcgccggtcccggtaaaaaatacgcttgcgcggctgttttccacgctgtttcgcttctatccggtcatgatgccgctgacgcttgtctgcatcctgttcagcgccgtggtcagctccattccggcggttttcatgcagaatgtcatcgcggccgttgaggcgagctggcaaagcggcgattggggcgcggccgcagggcggattctgccgcttgtcggcatcctttgtgtgttttatgtgctgtcgcttgccgcagccatgacgtttacacagcttatggctgttatcacgcagggctttctgcgcaagctgcgcgaaaacatgttcagccggatgcaggatcttcccatccgctattttgacacgaacaaccacggcgatgtgatgagctattacacaaacgatatcgacacgctgcgccagatgatttcacagagcttcccgcagcttgtcagcgcgggcgttgtcgtaatcaccatctttgcaatcatgatctattacagcgtctggctggcgctggtcgtcatcgccggcgtcgtctgcatggcgcttgtcacaaagcatgttggcggcggctccgcccgttacttcatccgtcagcagcatgcgctcggcaaggtggagggctttgttgaagaaatgatgacaggtcagaaggtcgtcaaggtattctgccatgaggagcaaagcaaggccgatttcgaccgtctcaatgacgagctgttttcggatgccgaacttgccaaccgctacgcaaacaccctcggcccgatcctcaataatatcggcaatatcctctatgtggttgtcgcgctgaccggcggcgtgctgcttttgtccggcgcgcccaatttcagtatctgcggccttggattcagcatcagcatcgttgtgccgtttttaagcatgacgcgccagttttcgggtaacatcaaccaggtttcccagcagctcaacgcggtcattatggggctggcgggcgcgcagcgcatttttgcgctgcttgacgagcagccggaatcggacgagggggttgtgacgctcgtcaatgtccgggaggatgaaaacggcgcgctagtcgaaagcgccgagcgcaccggactttgggcctggaaaaagccggacggcggcggcgcggcctatacgcggctggccggcgacgtgcgcctgaaggatgtggattttgggtatgtgccgggaaaaaccgtcctgcacgacatcaccctctatgccgagcctgggcagaaggtggcgtttgtcggggccacgggcgccggcaaaacaacgatcaccaacctgatcaaccgtttttatgatatttccgacggcgttatcctctatgacggcatcgatatcgggcagattaaaaaatccgaccttcgccgcagcctcggcgttgtccttcaggatacaaacctgtttacaggcaccgttatggacaatatccgctacggccgccttgacgccgtcgatgaggaatgcattgctgcggcaaagcttgcgggggcgcatgattttattacgcgcctgcctaatggatacgatacgccgctttccggaaacgggtccaacctttcacaggggcagcgccagcttctggccattgcgcgagctgctgtcgccgatccgccggtcatgattctggacgaagccacctcgtccatcgatacgcgtaccgaggccattgtccagcgcggcatggacgccctgatgtacggacgcaccgtgtttgtcatcgcgcaccgcctgtccacagtcaaaaacgcggatgtgatcatggtgctcgatcacgggcgcatcattgagcgcggcagccacgaccagctcatcgccgcgcgcggccagtattaccagctttatacaggcgcattcgagctggagtga

SEQ ID NO: 1838 - DNA, 3219 bp, Anaerotruncus colihominis
atgaacttatttgtttcaatggcgttttgcatcaccacctccattccagccacctgtattgcgcttatctatgcggagccgtttccgaaaaagcgggggcactattgttttttggctatgtgtatcctgtccgcgctttggaatatcggatacgcgggaatgttcatttcacaaaacccggattatacccgcggcttctatcggtttgtgctgatcggctcgctttttatttttccgctgatgttcaagctgatggaggagatcagtgaacggcggtattgtccgcttcaacaatttgaaatttacatgaccgcgcttgccgctatgctgtttgtgattgtggcgcgcagagaaaacctgatgctcgtgcatttggattggggcgggcttgatttctgtgtgcctcaggcgggtggggcgactgtcctgctcatcgcctattatacaattatcggtttggtgtttttatactcgctgtatcaatgggtcaaggcggagggagaaaagcggcgtgtgcgcgagcaggctggttggctgtgcctgtgtgttttcgtctgctttttggcactggcgctggaatacggcagcctgtttgtcggaatgccgtcgattccgatcgggggcatttcgaacctgctgttgcttgtaatcacgtttatcatggtccggcgttacaatacaatccagatcaatacgcataattttgctgaatatatctattcctcaaccaaaacgccgatcctgatttttgataatgaaggccggcttgcactggccaataaatgtacgcctctttttttcgatctgcctgccggcgcgctgatggggcgaaggccggaggatttgttcctgcgcgtaccggccgacggcgtgggggagacgcatagtgattcccctgtgcagatgacacggttcaactcggtttgccgcttcaataagaagccgtgtgatatcacagtgacaaatgtatacgacgcatacagcgaagtaattggaacgatctatgtggtgtacgatatgactgagaatatgcgccgtattcagctgttggaccgtatgcggcgcgcagaagttgaatccaaccgcttaaaaagcacgtttctggcgaatatgagccatgagatccgcacgccgatcaatgctgtgataggcatgagcgaaattctgatgcgcaagaagctgccagacgacctgcgtgccgacgtcggcgtcatacacagcgccgggcaggggcttttggcaattatcagcgaaatacttgacttttcaaaaattgaatcgggcaagttcgaattgatagagacggaatatatgctgccggcgctggtcgaaacggttgtacatattatcggcgtgcgcttttccaaaaagccggtatgcctgttgatcgatatcgaacccgatacgccgatcgggctgtttggggataaccagcgcgtccagcagatcctgctcaatcttctgagcaatgcggagaagtttacgcagtccggttatgtccgtttgtattggagatgggaacatgcgggcgaggatatggtgcggatgattatttctgtcgaggataccggcagcggaatccgcccggagaatcttgaaaagattttcgcgcagtaccagcaggtggatgcaaaatccaaccgcgcgcttgtcggcacggggcttggccttgcaatcgggcgcgagatggcgcgcatgatgggcggcgatatcactgttgagagcgaatacggaaaaggctctgtgtttacagtcacgtttctgcaaaagattctggacaatcgccccgtttcctatatgcccgagggcgtgcatgccaacgtgttgatctgtggagaaatcagatgcgtaaagaagtctattgaattttactttccgcgccttggcgtggattatacgctttgcacttcccccatggaagccatgcgctttgatccaaagacgtatacccacgtgatggcgcctgcggccgagatacgcgctctgcgcgcggtggacggatgggcgcacatccggttcatacagattcttgaggcgatggaatatgttgaaacgctcgaaggcgacgattgcatccatctgcctctgcttaaccgaaggattgtacgcgccctgtctggagaggataaagccgcgcctgatatcgtatgggagccggagcggatggaaaatgtacgcgtgttgattgtagacgacagtcctgtcaatctccaggtcgcggccggtctgctggagccgtatcacatggcggtcgatctggccgcgagcggagctgaagcgattgaactggcaaaaaagaatttttacgatctggtgatgctcgatcacatgatgcctgaaatggacggtgtggaaacggcggagcgcctgcgcgcgttgcctgattatggcagagtaccgattgttgctctcactgcgaacgctacaaacacagcgcgcaaaatgttccttgaaaacggtttcgacgattttctggctaaaccgatcaatctcctgcagcttgatcttctgctgaaaaagtgggtcggctccagactcagtgacccggttgcggttgccgcgccgccgctcgatatgagcggcggcgaaggattgcaggagcgcaatccttcgcttgatatccctgttctgcttgacacacaggcggggatcgatgcgttggggggcaacctgccagtctatacacatgtgattgatgcgttctgcgtggatgccgtacagcgtgccgatgaactggaaaagctggcggatagcaacctccgggattttacaatttcggtgcacgcactcaaaagcgcctgccgttcaattggcggcgcgcttgccgctgatgaagccgcgcgcctggagcaggcaggcaaggagggcgatgaagcttatatagggagcgcattgccgtcgtttctggcgcatttgcgcgcgttgattaccgaggcgcgcaaatggcttgaggagaacaaggcgcaggaggcacccgggaggcaggcgggattaagcagcgcggaagaaatccgcgggaagctggcgtccctgcgccgggcgtgtgaacgcgctgaaatcaaccgcgcggagaagctcgcggacgagctgttggcggagatttgtgatgaacggatacacttggcggttaaggctgtgcgtgcatcgcttggacaatttgactatatccaggccgtcgatcagatcgaccggcttctgaaggaggaaaactatgcctaa

SEQ ID NO: 1839 - DNA, 2706 bp, Anaerotruncus colihominis
atgatacggaaggagaaccatatggatgaacattataaaaatccgtcagcgcctctggaaaataatgaaacggtgaccggcgccgccaacggaaagttgaaaatcttttttggttatgcggcaggcgtcggcaaaacctacgccatgctggaagcagcgcatcaagcaaaaaacgagggaatcgacgtggtcgtcggttatgtggagcggcacacccgtccggacaccctggcattgctggagggtctggaggtgcttgactgcaaggaaattgactatcgcggaatcaaactgaaggaatttgacttggacagcgccctacagcgcaggccgcaattgattcttgtagatgagcttgcgcacagcaatgcgccgggatgccgccataccaagcgataccaggacatagaggagcttctgcgggcggggatcaatgtttacaccaccgttaacgtacagcatctggagtccttgaacgatcttgtttcttccatcaccggcgtagtggtcaacgaacgtataccggatttcgtgttcgacctggcaagccaggtggagcttgtggatatcgaaccggatgatctggtcaaacggctgcgcgccggcaaagtctaccgggaacgccaggccaaacaggcgcttgagaacttttttaccgcggaaaacctggcggcgctgcgtgaaattgccatgcgcagaacggcggaccggcttaatcgggcggctgtacatgaccggaaggggcaaaccgcccgtgcgggggagcatatcctgatttgcctttcctcggcgccgtccaacgccaaggtcatacgaaccgccgcgcgtatggccgaggcctttcacagcggctttacagctctttttgtacagacgcctgaaaccaaagagctgtccggagaaaacatcaaacggctgagaagcaacctgcgtctggcggaacaattgggcgctcagattgcaacggtatacggtaccgatccagcggtacagatcgccgaatacgcccgtgtcagcggtgtaacgaaaattgtgatggggcgcatgaatcaccggtctaattctataacccgcaaaaaaagcatggccgaccgtttaatcgagctgaccgatctggatgtttatatcatccctgatcagcagcccctttataaaaaacccctaggaaaaatccacaggaaaaagcttgtgttttcctggaaggacacggggaaaatgctgcttgttctgctcatctccaccctgctttgcttcactttttattccgcaggcttcagcgaatcaaatatcatcacggtttttattctgggtgttctggtaacggccgtctggacaaacggacacctgtatggcgccgtcagctcgcttttaagcgtagctgcctttaatttcttttttactgaaccaaaattcactttccaggccaccgatccaagttatcctatcacatttctgatcatgctgctttccagcttcattgcaagctctcttgcaagccaggttaaaacgcaggcgcagttgacggcgcaaaaaagttatttcacggaattgctgctggaaagcagtcaaaagcttcagcagggccgaaatgagttggaatgcttacaattggccgcggagcaattgaacaggctttttgaccggcccgttttatacagtttaaaccatccggatgaaaatctgtcgtttcgtgtggagccggcggacgaaaaacgggtactgaagcaattgaccaccgaggaaatcggcgtggcaaagtgggtccagaaaaacaataaacacgctggcgccacgacgaacacattgccggattccaaatggctgtttctgtctgtccgcggtgcgcggggcgccatggggcttgtgggaattccgatcgccggatatcccatcccagacgcttctgagaaaaattttatgatcgccattttaagcgaatgcggtttaagcctggagcgtctgcgcttgcaggaggaaaaaaaccaggccgcgcttcaggcgcaaaaggagcacctccaggcaaatctgctccgcgccgtatcccatgacctgcgcaccccgcttacaaatatcagcggcagcgcgtccatcttgatgcaaaaggaatgccccctggatgacgcggccaaagaaagactgtacacaggcatctatgacgatacgaattggctgatcagtatgactgaaaacctgttggcagcgacgcaccttgaggcggacaagggcgccctccccatggagccgcagcttttggaggatatattccaaagtgcggcaacgcagttggaccgccgggcgcgcgaacataatatttcgattgtgctgcaggacccgatgttgatggcaaatataaatgcgaagctgatcctgcgtgttatcatcaacatcatgaataacgccattcaatacacccccaacggctcgcacattgttttaagcggcgagcgtaagggggacatggtggaggtatccatttccgacgacggtcccggcattccggacgaagcgaaaaagcatctgttcgatttattctacaccgcggagcaaggccggtcggattgtcagcggggattgggattggggctgaatctctgccggtcaatcattgcccagcataacgggcaaatcaccgtatccgacaacaggccgtcgggaacggtattccgttttacactccccgctgtcgaccgacggggcttggagtga

SEQ ID NO: 1840 - DNA, 1779 bp, Anaerotruncus colihominis
atgatcatcagtatgttaggcggcctggcaatgttcctttatggtatgacactgcttggcagcggtcttgaaaaaacctccggcggccgtttggaacgaacgcttgagaagctgacggatacggtgatcaagggcgtgctgctcggcgcgcttgttaccgctgccatccagtcctcctctgcgacaactgttatcgttgtaggtcttgttaatgcacgggttctcaaactgcgcaacgccatcggcgtgatcatgggcgctaacatcggtaccacggttacagcccatatcctgcgcctgtccgatctcgattcctccaacctttttttccgctttctcaagccgacaacgcttgcgccgttggcctgtattgtcggtatccttttgattatgacggccaaacgcaacaaggcccgcgatataggctctattttcattgggttcggtatcctctttactggtatgtttacgatggaatcgtccgttaagccgctcgcggagctgccgcagttttccgcggcctttgctgcgatgggcaacattcctctgctcggtgtgctcgtcggtgcaggcgtcacggcgcttatccagtcgtcgtcggcgtccatcggtattttgcaggcgctctcctcgacaggacagattaccttcggcatggcctttcccatcatcatggggcaaaatatcggtacgacgatcacccctattctcgcctcgatcggcgcgaccaaaaacgcaaagcgttccgcctgtgtacatgtgaccttcaatgtgttgggcacgatcctgttttttacctgcggctatgcgctccagtctatccttcattttgccttctgggatttgccggtcgataaaggtatgatcgctaatttccatacgatattcaatctcaccgttaccattctctttataccgtttgtcggagttctcgaacggattgcctgcaccattgtgaaggataagccaggtcaaggtgaacaggaaatcaccgcagcctcgcttgatgaacgcctgcttgtatctcccggccttgcgcttgagcatgtgcgcggcgccgttgtacagatggcgttgcttgctcgctccaattttcttgattccgtcgcgctgctcgatcgctatgatcaaaaaatagccgatcggatacaggaaaatgaggatgttgtcgataagctggaggaccgtgttgaaacgtatctgctcaagcttggcgaacgcgagctgtctgaaagtgaaaaccgcagcatatccgagctgctgcacacatgcggcgaatttgagcgcattgcagaccacgcacagaatattgcagaatgcgccgaccgcatggtcgatacaaagacgactttttccaaaaaggcgacagaggaaatgcatacgatcagcgaggcagtccatgaaatcctcgatcttgcggtcgatgctttccagaatgtcaaccgcactgccgccgccaatatcgcgccgctcgaggaggttgtcgacgagcttgaacaaatgctaaaggacaagcatatcgaccgtctgcgccgtggaaaatgcaccgtcgacgctgctttcccgtatgttgaggcgctctccaacattgagcgcatctccgacctctgttcaaatgtgggtgaatctgtactgacctatgacagctcacttgttgaaatcgaccgccacgcttacaaacggttgcgcgctgaccagcatgataccggttatcaggataagtatattgtttacagtacgaaatattttggaaaggtaaaacggacgcaggacaaataa

SEQ ID NO: 1841 - DNA, 1593 bp, Anaerotruncus colihominis
atgaatgaagcaaaagatattgcccaaggccgctgctgcctgggtatcgagttaggttctacccgcatcaaagccgtactcattggctctgatcactcccccctagcctcgggcgagcacagttgggagaatcggttggaggatggtatatggtcctaccgcatggaagatgtatggacaggactccaaaaggcttacgccaagctgcgcggcaatgtattcacccaatacggcgtggaacttacttccatagccgctatgggcttctccgctatgatgcacggctacatggccttggataaaaacggagaactgctagtccccttccgcacctggcgcaacaccatcaccggacaggccgccaggattttaacggagcgtttccagttcaacattcctcaacgatggtctatcgcccacctctatcaagccatcctcaatgatgaggaacatgtcaaggatatccgctgtcttaccaccctggcgggatacgtccactacaggctcaccggctgtcaggcaatcggagtcggggaggccagcggcatgttccctatcgatagccgcaccggggactatgatcagacaatggcagacgccttcgacgccctggtggctgagaagcactatccatggaaaatacgggagattctgccgcaggttctccacgccggccagcccgccggaaccctcaccccagagggagctaaacttttggaccctgccggccttttgtcccctggcgttcctctggctccccctgaaggagacgcgggtactggcatggttgctaccaacactgtcgttccctgcaccggcaatgtgtccgcaggtaccagtgtgtttgctatgatcgtgctggagaagcccttgtccaaggtctattctgagattgatatggtcaccaccccatctggacagccagtagccatggttcattgcaacaactgtaccaatgagatcaatgcctgggcacaggtatttaagggattcctggaggctttggggcaggtccctgacatggatactgttttctccgctatgtttcactccgctctggctggtagggaggatgccggcgggctgactctttataattacctgtccggtgaaccaatcagcggattaatggagggccgccctctattggtacgcactccttggtcccaatttgactttcccaacttcatgagagcccacctctactccgccctggctacgctgaagatcgggatggatcttctgtctgaggagcatgtagctgtccatcggctgatgggccacggcggcttctttaagactccggaagtcggccagcgtatcctggctgccgccaccgcaacctgcgtttctgtcatggaaactgccggcgaaggcggtccctggggtatggccctgctggcagcctatctggtagagaaaaaatccggacaatcactggaggattaccttgacaaccagatttttgccggccagaccgtagttaccttggaaccccgtcagcaggatgtggagggtttcaaccagttcatgaggcagtatcgctgcggtctggcagtggaacgccaggcggtggagagtttaaaagcataa

SEQ ID NO: 1842 - DNA, 1845 bp, Anaerotruncus colihominis
atgacggaaaccgaggagaaagtggggctgcagccggctccggagacgccgccgctgccgcccgcgccgatcagcaagcatccgggccgttttacaagccgcaagggcaaaagaaagaaatttattgtgcctgcggtgattgtagcgattgtcggtgttgtcgcgtggaagatgctgaccagtgagccgccggtcgtcccgacggccagcacgccgttggaaaagatggatctggtcagcacgatcagcgtgaccggtacggtggagagcgcaaacgaggggcttgtctattcgaatctgaacagcctggtgacagaggtcggcgtcaaggtaggtgaccgtgtcgccgcaggcgatacgctcgcgcagcttgacacatcagatctgtcgctgtccatcgcggagcagcaggcacagatcaacaaacaggtcaagctgaacaatcatgcgcttgaacagtcgcagaaggcgctcgacaatgcgaaaagcgatatcgcaaacgacgttgacgcggatttgatttcggcggaaaacgccctcaagctggcgcagcaggagttgaacagcgcgcgccgcgaccttcaggatcacgaggacgaccttgaatacgccgattcggtgatgaacgatcttgaaaaggaactcaaccgcgcgcgcaacgagatgaacgacgcggagcgggaacttgagcttgcggaacgcgaggagcgcgaaaacggcacgccggttccgcaggaagttcgcgaacggtatgaacaggccaaggaaaagtatgacgcggtcaacaaggaatgggtcgaggccgaccgttcctatggcagtgatatcagcagctacagccgtgcgtaccgccaggcgcgcgtcagctatgaaaatgctttagcgaacaaaaaggctgccgaaaaccgtgcgagccgaaaccttgacactttgcaggatgaaattaccgggcagcaaatccaaaatgacgtaacctccatgcagatctcactgcaaaagtatcagaaggattttgccgactcgacgctcaaggctccgatctccggcacggtcacggctgtttacgccaaggagggtgcgcccgcgggcgggttaatgtttgtcgttgaggatacggacagcctggtgatcaaaacaaagctgaaggaatacgatatcgcctccgtcgaagtcggcatgcctgtcgtcattaaatcggacgcaacgggcgagcaggaattcatggggcatatcagccacatcagcccggccgccgtcaaatcgtctacaggcgagatccagactgagggcagcgttgaatttgacgcggagatcacgcttgacgagcaggacacgggtctgcgtgtcggcatgaatacacgtatgacgatcgaaacagagcgcaaggatcaggtatgggccgtcccgttcgacgctgtgacgacagatgcgcagggacaggatatcgtctatgtcgcccgcacggatgaaaacggcgtcacaaccgcggctcctgtcccggtgacaaccggtatggagacagatttctacatagaagtcaattccgatcagctcaacgcgggcgacttgatcatcagcgatccaggtacggttgttcccggcgtgccgatcaccctggcgaacggcgtgacggcggaagttgcggccgttcaaacggtatccgaagaaccgtcgcaggccggcgaaagcagcgctcccatggcggacacggatacggcggacgcatcctcagatgcgtccgaagcggcctccgctgcatccgcttcggatgaaagcgccggagggcaggcggattcctcctccgcggcgtccgcctcgcagggggggctgaccgatggaacatga

SEQ ID NO: 1843 - DNA, 2187 bp, Anaerotruncus colihominis
atgaattactatgttatagacgatttgcagcgggcgatcgaccggagcggtcgcgtgtatgaccgcgaaaagatcatggcagcctatcagcttgccaatgacgctcataatgggcagtgccgcgtttccggcgagccgtatatttcgcatccgattgcggttgcgattatccttgtcgacctgggtatggacagcgaatgtatccaggccgcgctgctgcatgacgttgtggaagatacggatatcacaagcgaggcggttgaaaagcagtttggtaccgatgtggcgctgctggtcaacggtgtgacaaaactcggaaagatcagctttacatcgcgcgaggagcagcaggcggaaaatgtgcggaaaatgcttttggcgatggcgcaggatgtacgcgtcatcatcatcaagctggcggaccgcctgcacaatatgcgcacgatcgaggtgatgcccgaacagaagcggcgcgataaggcgcttgaaaccatggaggtttatgcgccgctggcacaccggcttggtatccgggcagtcaaggaggaattggaggacatctccctgcgctatcttgatcctgtggcctaccatgagattgaatcaatgctggagcttaaacgcgccgaccgccaaagctttttggagaagatcaaggataaaattcgcgagcggctggcggcagaatacaacgatatttatgtcgatggacgtgttaagagcgtttatggcatctatcgcaaaatgtatattcagggaaaagcgtttgaagaaattttcgatatttatgcagtgcgcattatcgtcgattctgtcaatgaatgctacaatatcctgggcatcatccacgacctgttccggccgctgccaaaccggtttaaggattatatttccacacccaagccgaatatgtatcaatctctgcatacgacggtcatcgataaggaggcgataccgttcgaggtacagattcgtacctgggatatgcaccacaccgctgaatacggcatcgcggcgcactggaagtataaagccggcgtcaccggacgcgacaagctggaggagcggcttgcgtggattcgccagttgattgaaaaccagaaggaagctgacgacgtagaggatattgtgcggtcgattaaaagcgatctttcgcccgaggaggtatttgtgttcactccgaagggcgatgtcatcagcctgcctgtcggctcgacggtgatcgactttgcatacgctattcataccgaggtcggcaaccggatggtcggcgcgaaaatcgacgggcgcattgtcgcgctcgatacgccggtgcgtaccggtcagatcatcgaggttgtcacgacgaacgcgaaggatcatgcgccaagccgcgactggcttaaaatcgtcaaaacgacagaggcgcgcaacaagatccgcaactggtataaaaaggaacgccgcgaggaaaacatcgagcagggccgcagcgagcttgaaaaggaattccgccgcaatatgatcacgctgcccgacggaaagctgccggagtttttgtcggcgatcgccaagcggcagcacttcgagcttgctgacgattttctggccgccattggatatggcggcgtgctgctttcaaaaatcatgccgcgcatcaaggaaacgtttatccgcatgtaccgcacagacccgcacgcggcgcccagcccggcgcctgttaagcagcatcgtgtcagaggcgcgtcgggcggcgtcatcgtggaagggcttgacagttgcctggtcaaatttgcgcgctgctgcaacccgcttccaggcgacgagatcatcgggtttgtcacgcgcggattcggggtttcaatccacaaaaaagattgccccaacgtgatcaattcaatcaatgacccaaacaacgccgaacgttgggtgcgcgccgaatgggcgctcgaccaggccaagcgcgagcacttcaagagcacaatcgaaattgtcacggacgaccgcttgggcgctttggccgatatctccgtcgctctttcttcgatgcgcatttcaatcagcacgctgatggcgcgcgaagtaaaaacaggcgagaacgtcgtcacggtaacatttaccgtcagcgacatcgatcagctcaattttattatcaacaatctcaagaagattcccggtgtggagcgcgtcacacggtctgcgcagtga

SEQ ID NO: 1844 - DNA, 2748 bp, Anaerotruncus colihominis
atgaagcacgagacaaaacgaaccatcctgcgcaccctgctggcgtccctggcgatcgtcgcggccacctgcgccgttttgtatgccagcgacctgttgacctcccctatttcttccaaaacgccgcccgccggcattcccgccgccggagagcaattgcacgcgctgattgtccgcacacgcggcaacgccgactttccatccgcgcccggactctccgcgaagcagcagcgcgcgcagctcgatgaaatcgccgcgtttgccggggaatacggttacaacgctgtgttctttgaagccgttccatcctgtgacgcgctatatcgctcatcaatcctgccttccagcgcctattggatgggggaacagggtgcgttcgcattttttgacccgctcgattaccttgtgaatgtgtgcaaggaatccggcatccaagtctatgcgatgatcgatccgttcgccgtgtcagccgaggatcttgctgagtcctcgcccgcatcaaaaaatccggagtggatagcggcagacggtaggttcaatcccacagagctgggcgttcagcagcttgccggctctgtggccgccgagcttgccacccgctatgacatcgcgggtatcgtgctggaaggcgtggagccggccggttttgccgctgttgacaactatatggccgcgctttccgaaacggccgcgcaggtgcgcagcgccctgcgtctaaaggagggccaacgcctaggcatgctgctcccgtcaagcgcgtccccgagcgcggccgcgcttgcggaaagcggcgcgcttgattttgccgtcccggatttggccggactgaccgaacaggagttacccagcgtgctggcggtctggcagacctccggcgtcccatactatccgctgtatatcgcgagcgacgacacggcctttacccacctggcggacgcgattctctatcaggagcgcacgtccggcagcggcctggttgtcagcagcttttccgcgctgcacaccgattcacgcgccgccgcttattccctggctgcatcgtttgcacagactgagcaggcgaatatgcccgatcttacctacagcacagaatttgctgtgacgcgtccgacagaaacgctgactgtcggttcggattgggaaagctacttcatcactggcacgtccgacccaagcctgccagtattctacaacggcgctgagatcgcccgttctccctccggactgtggggcgtgctggtcaatgtgccatacggtacgaacacctatacctttacgcagggcggcgtcaacaagacggctaccattgtacgcaaccagccgtctgcatctgcggccatcagcgccattgtgaaaagctccgtctacccgtcgaatgccgaagccgtgctccccggacaatcactcaagctctcgtgtaccgcgccgggcggcggaaccgttaccgcgtcggttggcgggctggccgcgacgcttgagccggttgcacaggcggcggacggcgtcgctgtcacctatcaggcaaccatcgacgtttcttcgctcgcacaggacggcgaggtcaaaaatatcgggccggtcacatatacgcttgaatatggcggcgtcaattccgagcagcaatctgccggcgatgtctacgcctgtggaaacggcgcacgccctgttgcagttatgaaaacgttcattgtaccggtcaatgccaacgctgccgacgacggcgaatatgcaaccatcctcaaggaggactgcgtcgattatatcacggagaatgccggcggatattatcatctatcatcgggcggctatgtgctcaagggcgcggtcgatatcctggaaggctcccagacagcggaaacaaacgcttcctcgctttcgctggaacaaacggataaaggggaaaaacttacaatccgcggaactgcccgccctgcgtttgacggcgcaatggacgatgacagcgttacaatccgtctgtataatgtcaccggttttgaaaacctgagcacagccgcgcttgagagcaagctgtgttcatcgattgaaagcagtacggagcagaacacggtgacgctcacattccatttaaacgaaggcgtgcggttgctcggctgggacgttcgtttcaatgacaacgacaccgtgatttatctcaagcagcggccgacgcttgaccgcgcttcggcaaagccgctttccggcatcacggttgtgcttgatccaggccacggcggcgacgaccccggcgccgccggcgttcccggccaaaacggaccatttgaaaatatcttgaatctggcggactcctacgccatagaaagccgtttgacggcacttggcgcaaaggtgcatgtcctgcacaacaatgaaaatatgacgctcaacgaacgcgtcgaactggcggaacagtttgacgccgatatgtttatttcaagccaccacaattctctctccgaaacggttgattccaatgaagtttccggtattgaggtctactattataacgaccagtcggagctgctcgctgaaaagatcggctggagcctcgcggaggatacgggccgcaaactgcggtttaccgaacaatcgtggtaccgcgttacgatgatgaccggttgtccggcggtgcttgttgaatcaggctatatctgcaaccccacggagtatgaggaaatcgcagatgaatatgccatgtttaaatatggcaacgccgtcgccgacgctgtgctccagtacttcgcagcgtaa

SEQ ID NO: 1845 - DNA, 2286 bp, Anaerotruncus colihominis
atgttgggggatcaaatgatgaaaattggcaaaaacgcgctgaccgttttggagcggcgttatctgaaaaaggatgaacacggggaaaatattgaaacagtcgagcagatgttccggcgcgtcgccgatgcaatcgcttcggccgacgccgcttacagcggcaagactgacgttgcggcactgtcaaaccgattttatgagatgatgacaaatctggagtttttgccgaactccccgaccttgatgaacgccggcaaggagcttggccagctttccgcctgttttgtgctgccggtgggcgattcgatggaggaaatcttcgaagccatcaagcaggcggccttaatccacaaatcgggcggcgggacgggcttttccttctcgcgcctgcgcgcagccggcgcgaccgtgcgcagtacgggcggcgtggccagcggtccggtcagctttatgcgcgtgttcaatatggccaccgaggcagtcaagcagggaggcacgcggcgcggcgcaaacatgggcatcctgcgcatcgatcatcccgatatcctggagtttatcgactgcaagaaaaataacgccgacatcaccaattttaacatctcggtcggcatcaccgaggaatttatgcaggcggtccagcagggcaatgcttatgaacttgtcgatcccaaaacaaagcaggcagtcggccagctcgacgcgcgcgaggtctttgacaaaattgtggaaagcgcatggcgcaacggcgaacccggcattatttttctggatcggctcaaccgcgacaacgtcgtgccttcgcagggcgagatcgaaagcaccaatccctgcggcgagcagcccttgcttccgtatgagtcgtgcaacctcggctcgatcaaccttgtcaatatgctcaaatgtgaaaacggcgcatacgccgtcgattatgacaagctcggccgcaccgtgcgcgacgcagtgcattttctcgacaatgtgatcgacgtcaacaaatatccgctcgcggaaattgacgttacaaccaaacagacccgtaaaatcgggcttggcgtgatgggctggtccgatatgctcgcttatctgggcgtaccttacaattccgacgaggccgtcgcgctcgcccgccgcgttatggagttcatcaccaaaaccggccgcgcagaatcagccgagcttgccaaagtgcgcggcgcgtttccactgtttgaaaagagtatctatgcgggcggaacgccgcttcgcaacgcgaccgtcaccacgattgcgccgaccggcacgctttccatcatcgccggctgctcctcgggtgtcgaaccggtattcgcctatgtctttatccgcaacgttatggacggcaccgaaatgatcgaagtcaaccccgtgctcaaggagatcctggaggcgcgcggcctgtacagcgacgggctgatgaaaaagatcgccgccgaaggctcgttgcagcatatcgaggaaattccggccgacatccgccgtgtatttgtctgctcgcacgacgtaagcccgctttatcacaccaagatgcaggccgcgttccagcagttcaccgacaacgctgtgtccaagaccgtcaactttaagcacgacgccaccattgaagacgtgcgcgaagtctatatgctttcctatgagcttggctgcaagggcgtcacgatctaccgcgacggcagccgcgacagccaggtgctcaacatcggttccgtcaaaaaggagggcggcgcccctgccaaagccgaacagccagccggttttggtcaaatcaagccgcgcccgcgtccggaggtcacctgcgggctgacggaacgcatgaaaatcggctgcggcaacctctatgtgacggtcaactacgacgagcagggtatctgcgaggtattcacctcgaccggcaaggcgggcggctgcccgtcgcagtcggaggcgacggcgcggctcgcgtcgatcgcgctgcgttccggcgtgtctatcgacgaaatcctcgaccagctccgcggcatccgctgtccttcgaccattcgtcacgcgggtatgaagtgcacctcctgcccggacgcgatcgcgcgcgtcatcaaaaagacggccgacatgatcgcgctccagcagggcctgcctgttgccgcgccgaatgcgccgtgcgcatcctgtgcggcggaagcgccagaaacgaccgagcacggttcgaagttctgccctgaatgcggaagcgcgctcgagcatgagggcggctgtgtgagctgccgcagctgcggatattcgaaatgcaactga

SEQ ID NO: 1846 - DNA, 2166 bp, Anaerotruncus colihominis
ttggaggttgagcgcgcgatgaaccggattgcaaaagtaccggtagtcatgcagatggaagccacggaatgcggcgcagcgtgccttgccatggtgctggcacatcacggaaaatggctgcctttggaacaggtgcgccttgcctgcggcgttggacgggacggcagcaacgcgggaaatctcctaaaggccgcccgcagctatggcctgaaggcgcagggctaccggtgcagcttgtccggcgtcaggaatatgacctttccgttgattattcactggaattttaatcattttgtggtgctgtgcggctttcgaaaaagaacggcggtgatctgcgatcccggcaggggacgcgtggaggttcctttgcaggaattcgacgaagccttcaccggagttgccatggcatttgaaaaaacaaaatcctttacgccggccggccggccgcgcagcgtgttggcatttgtccgctccagactgcgcgggacgctcgcaccaatgatctgtgtggtggcaatcagcctgcttgcatcgttgtccgggctggtgtcgccgcttttttcacgcgtttttcttgacgaaatactcagcggaaaaaatccacgctggctgccgctctttttgatggcgctgggcgctctggttgtattccaaacgattgtatcgatcctgcaagcggtttatttgctgaagctgcggggaaagcttgctgtttcggcaaatgcccggtttatgtggcatgtgctgcgcctgccggtggaattcttttcgcagcggtatgccggtgatattgcgcagcggcagcaaagcaatgaaatgatcgcagaaacgctgatttcccaattgggacctttggcgctcaatctgggggtcatggcgttttatttttgtttgatgatccggtattccccgctgctgacagcaatcggacttacagcggttgtctgcaacctgttgatcacgcagtatacttcccgcaggcggaccaatttattccgcctgcgtatgcgtgatgcgggaaagcttgcgtcagcgacggtttcaggcattgagatgattgaaactatcaaagcaagcggcgcggagaacggtttttttcagcggtggagcggtctgaacgccagtgtcaacggagccgatgtggatgcggcgcagcttgaaagcggctcgggcgcgctcttgcaggcgctctccggtttagccggcatagcggtgctgttattgggcgcggccctgattttgtacggccgtttcacggcgggaatgctgttggcatttcagtcgtttctgacttccttcatggcgccggccgggtccctgctttctctgggccagcagatgcaggaaatgcgcgtttcgatggagcgagtggaggatgttgaaagctattctcccgatgtggaggctccggcggcgcaaacgccggcgccagagggccttgagaagcttttgggcggcctggaactggatggcgtgacgttcggctattccaggcttgcgccgccgcttatcgagaatttttccctaagcctgcgtccgggcggctcagtcgcgtttgtaggtgcgtcaggctgcggcaaatcaacactggccaagttgatttccggattgtatcagccctggagcggggagatccgctatgatggacgcttgcgccatgaaatcccccgtccggtgtttacaggctcgctggcggtggtcgaccaggatatcacgctgtttgaggacagtatcgctgacaatatccgtatgtgggaccggtccatcgaggactttgagatcattctggctgcgcgggacgcacagattcatgaggacatcgtagcgcgggaaaacggttacaatgcggtactctgcgaaaatggcaagaacttttcaggcggtcaatgtcaacggctggagattgccagggtgctggcgcaggaccctacggtcgttatccttgacgaagcaacgtcggcgcttgacgccaagacggaatatgaggttatccgttcgatccgggaacgtgggatcacctgtatcctcgtggcgcatcgtctttccaccattcgcggctgtgacgaaatcattgtgctggaggatggccgcgtggtggaacgaggaacgcatgacgagctgtatgctaaaaacggggtttatacacgcctgatttcgatggagtaa

SEQ ID NO: 1847 - DNA, 3474 bp, Anaerotruncus colihominis
atgaagggctttgagagccttctgagcgggatggatgcgtttgaacgcgtcaaaggcgcggttgccggccatgcgacgccggtgctcgcaacagggctttcggccgtacacaaggcgcagttggtcgtttcaatcacgggcctgctccaaatgggcgggcttgtgattgttcctgacgaagccgccgctgtgcgcatctgcgaggatatcaatatcatggcgggcgccggcacggcggtgcagtatccgtcgcgcgagccgacgttttatgatgtgcagggcgtttcacacgaatatgagcatgcgcgcctggcggtgctcgggcggctgcgcgcgggcgatgcgcgcattgtagccgcgtcggcgcaggccgcgcttcaatataccatgccgccgtccgtgctctccgcgcgcacgcgcacaatcgagtccggcggccagtacgatatcaaggagctgatcgcgtttctcgtcgcggccggctatacgcgctgcgaccaggttgacggcgtgtgccagttttcacagcgcggcgggattttggatttttcaccgccgcatatgccggacccgttccgcatcgaattctggggcgatgagatcgatacgatctccacgttcaagaccgatacgcagcggcgcgtggacacggtcaagcgcgtcgatatcacgcctgcggccgaggtggtcgcggacagcccggcgcgccttgtaaagcttttggaatccgcggcgaaggggctgcgcggcacgcagggcaagcgtgcaaaggaaaagctggcgcaggagattgaacagattgaaaacggcgtgctgccgcagagccttgaccggtggatgccgctgctttacccggagcctgccacgctgttcgattatatgccaaaggcggcgttatttttatgcgatactgccaattgccgcgagtcgctaaaaactgtccagtggcagcaaaacgaggacgtcaaaatccttttggaggagggcgtcctctttaaagggtgcgaccgtttcgcagaggactttgtcgacttgcagcggcatgcggcgcagtcgaacacggtgctgctcgacacattcgcccggtcggtcggcgatatcccgctgcgcgatatggtcgatatccgtgcggtccagctttcctcgtggagcggcgaattttccctgctgcgcgaggacgtgcgggaatatatcgggcgcggctaccgcgtggcggtgtttgccggaaccgagcgcgcggccgcctcgctggcggaggatctgacgcgcgccggcctgcccgccgtgcagagcggcgatctgacggatttaaagcccggcggcgtgcgcgtggtgccggccagtatgagcgccggcatggagtaccccgatatcaagcttgccgtcatctcgcaggcaaagaccgtcgcgcagtcgggccggcgcaagccgcggcccaaagagggcaagaagctgcgcgacatcagcgatctgaccccgggcgattatgttgtgcacacggcccacggcatcggcgtgttcgaggggattgttaaacgcgatatccagggcgttgtcaaggattatatcaaaatacgctacgcgggtacggatacgctgttcgtgccggtgacgcagcttgatctggtgagcaaatatatcggtatgcgcgacgatgcgaacgtgcgccttagcaagctcaattcgattgagtggcaaaagacgcgccagcgcgtgaaaaaggccgttgaggatatggccaaggagctgaccgagctgtacgcgaagcgtatggcggtcaagggatacgcgttttcgccggacaccgattggcagaacgacttcgaacgccgctttgcctacgacgaaacggacgatcaattgcgctgtatcgatgagatcaaagccgatatggagtcgtccgtaccgatggaccggctgctgtgcggcgatgtcggctttggaaagacagaggtcgcgctgcgcgccgccttcaaatgcgtgatggatggaaagcagtgcgcgctgctggtgccgacgacaatcctggcatggcagcattaccagacggtcacacgccgtatggagggctttccagtcaaggtggatctgttgtcgcgctttcggtcgccgcgcgagcaaaagcaggtgcttgacgaattgcggcgcggggaaatcgatatcgtgatcggtacgcaccgtttggtgcaggacgatgtgaagttcaaggatcttgggcttgccatcatcgacgaggagcagcggttcggcgtacgccacaaggagaagtttaaggaaatccgcgcggcggtcgatgtgctgacactctcagcgacgccgattccgcgcacgctcaatatggcgatgtcaggcatccgtgacatgtcggtgatcgaggaggcgccgcaggaccgtcatccggtgcagacgtatgtggtggaacacgattggggcgtcgtcgcgcaggcaatcgagcgcgagctgcggcgcggcggacaggtattctacctgcacaaccgggtcgaatcgatcgattcgtgcgcgtaccgcatcaagcagcttgtgccgcaggcgcgcattgtgacggcgcacggcaagatgacggaggaacagctttcgcgcgtctggcggcaactgcttgattacgaggtcgatatccttgtctgcacgacgatcatcgaaacaggcgtcgatgtgcccaactgcaacacgctgatcatcgaggacgccgaccgcatgggcctttcgcagctctatcagcttcgcgggcgcgtgggccggtccaaccgccgcgcgttcgcctatctgaccttccgccgcgataagcagttaagcgacgtcgcctccaagcggctggcggccatccgtgagtttacgacgttcggctcggggttccgcatcgccatgcgcgatcttgaaatccgcggcgcgggcaatatcctcggcgcgcagcagcacggccacatggaggccgtcggttacgatatgtatttaaaaatgctttccgaggcggtcgcgcagcagcgcggtgaaacgcctgcgcaggccgcggcggaatgcatggtcgatgtgcgtgtcggcgcgcatatcccggaggattatatcgacaatctcgcgcagcgcattgatatttataaaaagattgcgtcgattcagaacgaggacgacgcgatggatttgatcgacgagctgatcgaccgcttcggcgacccgccggaggcggttaaagggcttgtcgatgtcgcgctggtgcgcaacacggcgtccctgatgggaatcagggagatatcgcagcgcggcgacgcggtgctgctttatccggaggtcatggatatggcgcgtgccggaagcctagcagtcaagctgcgcgggcgcgtgcttgtgagcgcaggcagcaagccgtacatcactgtcaaaatgcagaagggcgcgcagccgcttgatacgatccgcgaggcgctcgccgccatgaaggacggcagggaaccggcatag

SEQ ID NO: 1848 - DNA, 1731 bp, Anaerotruncus colihominis
atgcggcaggacggacgttttttacacggcgttttcagccggtttttgttcccgactgtcttgtctgttttaggtggcacggtcaacgtcatggtcgacagcgcgatcgttggcaacatgatgggagcgcaggcattggcggcgatcaatctgtgcggaccaatttttctgctctgttcgacagccggctcgctgatcggttccggggccggacttttggcggccgcgcagattgggcggggagaaagtgaaagaagctgtgtctgctatacgctgtgcgtggccttgcagtttttgttcgggttcctgttgacgataggcggccttttgtttttacggcctgtcgtcaggcttttgggggcggacgacacgctgttcgcaatggcgctttcctatgcacggattgctttttggggcgctccagtgaaatgtctgctctatgtaccgtttaattttctgcgtctggatggaaaaccggctatggtgagcgtttcccttctcgcgatgaccgcgctcaatggcgtgctcgattatcttctcatcaaagtcggatggggattggcgggcgcatcgctggccagcgtactcgctacctgtttgggtgtggcggtcggatttgtctgcctgcacggcggcagcttccgtctgatcgtgccgcatggcggcgcgtcaattctgcgcgagctgctcgtattggggacgccgcccgcgctcaacaatctattgtctgtggtacggatgattctgcttaaccgcatcctgatggcggcagggggcagtggctttgtagctatctttacggtggtcggaagcgtcagcgactttaccctttgtgtgatttcgggcgttccgcagacagcttctccgctggtgggtatctatagcagcgaacgcaacaatccggggatgcggctgctggtacgcatgcagctatgctatggcggcgttctgatcgggggcatggccgccgcgattatattggcgcccggcctaatctgtacgctgtttggcctcacgcaaactgcacaggctgtttgggcgctgcgtctgtttgcgctgtcgctgccaatggcgatgctgtgcagcatcctgatctttttttataatgcaagcggacaggtgccgcttgcaaatggggtgaccgtctgccgggtccttctgtttgcggttattcctgcgtttgttttgagccgggcaggctttcctgtttggtggttttttccgctctccgaactgctgaccttggcggcgctttttgtggcgctgtggcggaaagcacggccggatacgctgcgatctccgattcttttgctcgacgaagcatatgaccgcatgggcaaggtcattgacttctcggtggaagcgcgggctgatgcggtagggcgggccgctgaactgatcggcggcttttgtgaacaaaataacctgaccgcccggcagacgatggccgtgagcctttccatcgaggagatgctcacgattatgatgaagcattgctttaaggagcagagtcaagcgactgtggatgtacgtgtgtttgtcattcagggggaggttggcctgcgcattcgcaatgcgggaaaacagtttaatccaattgattattatcaggcgcatcaggcggcggacgagatgggcgaagctcttggcatccgtatgatcttaaagctggctcaaagcgtatgctatcaacgtacgtttggggtgaataccctgacgattctgttatag

SEQ ID NO: 1849 - DNA, 2613 bp, Anaerotruncus colihominis
atgcccaacggctcgccgctcatgcgggaccgccagtctggtaccgcccgatttaaaacgacaccaattcgctttacggacaaggagagatcgatgttgcttgtttcaccggaacaaaacaaaggcgcgtgccgcagagcgtttttgatcgccctggcaacggccgcgcttatcttcatccccttcatcatctgggacaaggggtacttctttttttacggggattttaacgtccagcagattcctttctacaagctcgcgcacgaggcggtgcgcagcggcgatctgttctggaactggtataccgatctcggcgcgaacttcatcggctcatacagcttttatctgctcggcagcccgtttttctggctgacgctgcctttcccgactgaatttgttccgcatctgatcggcccgcttttgattctcaagcacgcctgtgcggcagcgaccggcacgctctatttcaagcggtttgtagcgccgcgttcctatgctgttttcggcggtctgctctatgcgttcagcggctttgccgtttacaatatctttttcaatcactttcacgaagcgatcatcttcttcccgcttcttctggtcggccttgaggagctgatggtcaacaaccggcgcggcgtgtttgcgctggctgtcgccatcaatgcgttcgtcaactactggtttttcatcggcgaggtcgtctttgtgctgatctattttgccttccgcgccgcgtcgcccgactggcatatgacctggaaacgttttttctggaccgccttcgaatcggtcgtcggcctgcttttggccatggcgctttttctgccgtcggtgctggcgatcctcggcaacccgcgcaccggcgcgagcgaaacgctcaacggctggaacttctggctttattggcataatcagctctatccggccattgtcagcagcgcgtttttcccgcctgatctgccaagccggcccaacctgttcccggatcgcggcgcaaaatgggcgtcgctctccgcctggcttccgtttatcagcatgagcggcgtgatcgcctacgtccagtctaagcgcgactggctgcgccgcatcctgttgttctgcctcgtggccgctctggtgccggggctgaacagcatgtttatccttttcaattcctcctattatgcacgctggttctatatgcccatccttttgatggcgttggccaccgtgcaggcgctgcgcagccggtcgatcgatctggagcgcgggatccgatggacctttatctttaccgccggcgtaacaatcatcctcggcctgacgccgacgctccagtcagatggttcggtcaagttctgccttgcaaaatatcccgaccgtttcgccgccactgtggcgatcgccctgctcgggttgggcgcgctctggctgatcgttaagcgcctgcgcggcacgccgaagctctttatgcgcgctatgacggccgcctgctgttttgtcagcgtcgtctactcgatcaccttcatcgccatgggcaaaacacattccgacaataccgattttatccgtgataccgcgcttgacggccgttaccaattggaactgccggacgatacctttgcgcgttccgatatttataagggcatggacaatctggggatgtattggcacctgccgaatattcaggcgtttcacagcatcatccctgtttccacaatggaattttatccgaaggtcggcgtcaagcgcgacgtctcctccaagccggaaacacagtattaccagcttcggccgcttctgtctgtgcgctggctctttatctcggagaacagcgaggatcaggacgtgatgcccggctatgagctgcattcgacacagcttggttacaatgtttatgaaaaccagtattttataccgatgggcttcacctttgattactatattactgtgcgcgaccttgaacagatcccggaggacgaccgcgcggcggtcctgctgcgggcgctcgtgctcaaggatgaagccgccgcgcgccacaacgacctgctggagcggatgccgcagagctactacagcaatctgggcgaggacgaatactacaccgactgtgaaaaccgccgcgcgacagccggctactcgtttgaaatcgacaaccgcggtttcacttccaaaatcaatctgccgcgggaaaatcttgtcttttattccgtcccatacgatgaaggctggtccgcgaccgtcaacggcgtccccgctgaaatcgaaaaggttgatctcggtttcatggcggtgcgcgcgcctgccggcgacaacaccatccggttcacctacacgacgccgggactctatcccggtctggccgtcagcgccggcgctctgcttattctgattgtttatctgctgctttacaaaaaatacggcggcgccaaaggccccgatcaaccatattctgcacacagcgactttgaccgtctcgacggcaaggagcaggaaccacccgccgaatggctcgaaaacgatcggcgcggcgaaccggacggcgacgggccgctgacgccgcccgccgaatggtttgacgaaccgcagccgcccacaggatcggacggcggacccaaggaggaacccaaatga

SEQ ID NO: 1850 - DNA, 2121 bp, Anaerotruncus colihominis
atgtttgaaaactacaaggtttatgaaatcgaatacggcgggaaaaagatgacgtttgagacgggcaagatgtgctgcctgtcgaacgcttcggtgctggtgcgctggggcgaaacggttgtactcgtcaatgtgaccgcctcggccaagccgcgcgaaggcatcgacttcttcccgctttccgtcgattttgaggaaaagctttacgctgtcggcaagatccccggctcgttcatcaagcgcgagtcgcgtccgtccgacaaggcgatcctgtcctcgcgcctcgtcgaccggccgatccgcccgctgttcccgaaggatatgcgcaacgactgttcggtcgtcatgaccgtcatgtcggtcgatcccgactgcctgccggagatcgccggcatggtcggcacttcgttcgcgctgtcgatttccgacatcccgtggaacgggccgattgccggcatcaatgtgggccttgtcgacggcgagatcatcgtcagcccggacgctgcccagcgcgcaaagagcgatctgaacctgactgtggccgctaacgaggatgtaatctgcatgatcgaggcgggcgcgaacgaggttgccaacgatgtgatgctcgacgcgatcatcaagggccacgaggagatcaagcgcatggtcgcgttcattaagaacgtccaggccgaaatcggcaagcccaagttctcgttccagtcgatggaggtcccgcacgagctgttcgacgcgatcagggattttgcaatcgacgatgttaaggccgcgctcgacaccgataacaagaacgtgcgcgatgagcgcctggcgccggttgtcgagcgcatccatgagaagtttgacgacgaggaaaagacgaacgcagcggtaattgatgaagcgatctacaagcttcaaaagttcattgtccgccgctggctgctcgatgaacagaagcgtgtcgacggacgcaaaatggacgagatccgcccgctggccgcggaggtcggcctgttgccgcgcgtgcacggttccggtatgtttacgcgcggtcagacacaggtgttgaccgttgccacgctcggtacgatcagcgaagcgcagaagctcgacggcatcgacgatcaggagcagaagcgttatattcatcactataacttcccgtcctattctgtcggcgagacgcgcccgagccgcggcccgggccgccgcgagatcggacatggcgcgcttgcggagcgcgcgcttgagccggtaattccgccggtcgaagaattcccgtatacaatccgccttgtttccgaggtgctttcctcaaacggctcgacgtcacagggttcgatctgcggctctacgctggcgctgatggacgcgggcgtgccgatcaagcgcccggtcgccggcatttcctgcggcctgattaccgagggcgaccgctggatgaccatggtcgatatccaggggcttgaggactttttcggcgacatggacttcaaggtcggcggtactgaaaaaggcatcacagccatccagatggatttgaagatcgtgggcctgacgtatgatatcatccgcgaggcgtttgaaaagacgtataaggcgcgcatgtacatcctcaacgacatcatgctgccggttatccccgcgccgcgcgaggaactttccaaatatgctcccaagatgaagtcgatcaagatccatccggataaaatccgcgaggtcatcggttcgggcggcaaggtcatccagaagatttgcgcagactgcaacgtcaagatcgatatcaacgacgacggcgatgtgtttgtcgcgggtaccgattccgacggcgtgcgccgcgcgctttcgatcattgagacgatcgtcaacgatccggagatcggcgcgatctataagggccgcgtcacacggctgatgaacttcggcgcgttcgttgagcttgcccccggcaaggagggaatggtgcatatctccaagctcgatatgggccgcgttgaaaaggtcgaggacgtcgtcgccgtgggcgacgaggtgatcgtcaaggtgacggatatcgatcagcagggacgcatcaacctctcccgccgcgatgcgctcattgcgatggaagcgaagaaaaacgctgcaaagcagtaa

SEQ ID NO: 1851 - DNA, 3018 bp, Eggerthella lenta
gtgacgtttcgagctctcgtcgttttgccgttctgcgtcgcgttgggaatccagggcgtcgtctgcgctaccgtgctcgcgcgcagcgagatactcaaacagatggagatcgacgcgtacgatctgttctcggagcgcgtggcgagccgtgcgggttatctggaaaacgatatgatattccgctggtcggacttcgatcccgtggtggaaagcgcgaccgccagcattgacaaggcgctggccgcggctcaggcaacgtcggcggatatcgaaaccgggtccgatctggccatctccataatcgaggcgacttcccaagaccttctggcctattctcatcgcgccgaagtcgacggcgtgttcctcgtgctggctgacggcgcaggaggacaatcggacaatcggacggcgctgtacatccgcgactcgaaccccaaggtggaggttgccaacggttccgatctcatgttggccgcctgccccatcagcatcgggcgacagctgggcgtcaccctcgacagcatgtggtccgccacgttccccttggcagccgaaggtgaaagccggagcgcattttattacgagcccgtgcgcgctgccgagcgctaccctgaggccagcacgaacgatctgggttactggggccgtccggtcgacttcggatgggcgggaaccccttccattacgtacagcaagcccatcagggatgcgcaagggggcatcgtgggcgtcataggcgtggaagtgcgcctcgaccgcgttgcatccttcttcccgtatcgcgatctcgccagcagcggcaacggttcgtacgtgctggccatcacgaacgaggacggcggcttcgtccgagacggcggcgtggcgccgctgccggacaaggagcgggtgtacgaggcgcttaccaccaccggcgcatcgcagagcctgtacctgaaggagtctgcgttctccgcgtcgatcgacggcgccggacgcatggtggtagatccggcggacgacgcttcctccgacgcgcgagccgtcgccagtgcagctgagatccagctctacgacagcacgtccccgttcgcgtacgagcattgggcgctcgtcgggcttgagcgcgaaggcgagatgttctccgcatcgaagacgctgtccgacaacctcaccgccgtgttcgccgcatcgctcgtggtgggcttgctgattgccgtcgtcgctgcgtggctgtcgtcctcacgtttgcggcatctcatgtccgaggtgcgcgcggcgcagcccgagcagcctattgcgttcactcccacgggcatcgtggaggtcgacgagctgtccgaggccatcgagtcgatgggcgaggaagtggccatgaccgcatcgcgcctatcgcgcatcctgcgcctgtccgaccgcggcatcggcgccttcgagtacagctacgaaacagatgccatcacctttaccgacgggttcttcgccacgttgtcgacgctggaacctcctgatccctcgtacttcgatccgcagcgcattgcgacggggtcgttgagcgcgagcgagttcgagagccttatgaaatggtacgttccctacatcgaggtggaggacgagggccgctacctcttcacgggcccgcatcgaacctcgtgggttcgtctcgtggtggtggaaagcggcgagcacaaccgcgtgctcggcctcgtggaggacgtgacgcatgagatcgagacgcgtcgccgcatcgagcatgagcgcgaccatgacatcctcaccgggctgttcaaccgccgtgcattcgagcaggaggttactgacctgctcgcgcaacgcccgcctgcgctgggagcgatgctgatgcttgacctcgacaacctcaagttcatcaacgatatctacgggcacgattggggcgatcagtacatcaaggcggcgggccgcgtggtggacgaggcgttcagggacaagggattctactcgcgcatctccggtgacgagttcctcgtgttcgtcgacgtatgccccgatcgcgcatcggtggaagaccttttcgccacgttccgcgccatgctcgatgccagctccatcgtggcgcccgacggaaagacgctcaaggtgcgcgcgtccatgggcgcagcgttctatccggaggatgcgacggacttcgctcacctgcgcgaatacgccgacttcgccatgtacctggcgaagagcagccgcaagggggatctgttctcgttcgatcggcaaagttacgaggagaagtcgttcatcgtcaacaacaaggaggacttgaaccgcttgctggaggagggtctcgtcgagtatcacttccaacccatcgtcgacctgcgtgcgggcgagccggtggcgtacgaagcgctcatgcgctcgcagttggacaccattccgacgcccgaccaggttctggcgctggcgcgctcgcagtcgaagctctaccgtgtggaacacctcacgtttttcggcgcgctcgaggcgttctcccgctatcccgaggcgcatggggccactctgttcgtgaacagcatcgctacgcagcgcttgtcgtccgacgacgagctcgtactgaacgagcgctatccggacctgctcaagcgcctcgtcatcgagatcaccgagagcgattacagccgcgagatggcgttgtacaaagaggcgctggcgcggcgcttcggcgcgcgtctcgccatcgacgacttcggcagcggcaacaacggcgagacgtcgcttttggactaccacgtggacttcgtgaagatcgacatggagatcgtccgcgacatcgacgtggcgaaagaccatcaagacatcgcccgcaacctgatcgtgtacgcgcatgatcgcggcatccgcgtgatcgcggaaggagtggagaccgaggccgagctgcgagcgttgcgcgaattgggcgccgattacgtgcagggctacctcaccgggcggcctgctcctgagccgcgcgatgtcgacgacgaggtcaagcgcctcatccgcagcctgaacgacgcgcgatag

SEQ ID NO: 1852 - DNA, 2658 bp, Eggerthella lenta
atgagcgattgcgatattcgtcagtcgtcgaacgatgagcctgacgaagcggttccgaggatgcggcacgacgcgccgctcgcggtcgacgggagccatggcggctccaccgatctgcgcagcttcgtgttcgatacggttctcgaaggcatgcgcacgagcatctacgtgactgatccgaagacggatcgcattctttatatgaacgggttcatgaagcacgattacggcgtggaggatccggagggcaaggtgtgctggcaggtgctgcagcgcggcttgaccgagcgatgcgccttctgcccggttgacgagcttctaagctgcggcgacgaagttccattggtggagtgggacgaggaaagccccatgacggggcgcacgtaccgcaactacgacagcctggtgacctgggtcgacgggtcgcgtgtgcatttgcagcagtcggtggacatcacggcgctcgtttctgcgaacaccgacgaactgaccgggatgctgtcgcgccgagccggtaaggagcggctgggcatctcgcttgcgcgggctgcggtcgagggcgagcaggtgtccgtcgttctatacgacatcaaccggctgaaggatgtgaacgatcttcatggccatgccgagggagattacctgatccgttcggctgcgaacgccgtacgatgcgaattcggtcccaacgattacgggttccgcttgagcggcgacgagttcgtgtgcgtattcctaggcgacgcggcttccacgcgcgtcaagatcgagcgcgcacgcgctgcgctctccgcgactccgcgccgtaccgagcctccctacgagatgggtttctgcttcggcatcgcagaggcggaccccgaagcgccgctggagttgtacgaggtgctggccttggcggaccggcgtatgtacgaggagaagcgacgttttcatatagatcgcaacatcaacgccctgatcagcgctgaacgatcgggcaggggggtgtcggtcgatccgtgctcgttctcgtacgatgaaagcaagctgtacgacgcgctggtcgagagcaccgacgattatctgtacgtatgcaacatgagaaccggcgtgttccgctacccgcgcgctatggtggaagagttcgaccttccctccgaggtggtggaaaacgcggcggccgtgtggggttcgaaggtgcatcctgacgacaagcaggcgttcctcgaatcgacccaggaagtcgccgatgcgcgcacgacgcgccattgggtggagtatcgcgccatcaaccgcaaaggcgaatgggtgcgtctgcgatgccgcggccggctcatcctcgacgcgaagggaaagccgctgctgttcgccgggttcatcacgaacctgggaaagaagagcaaggtcgacccgctgaccggtcttttcaacaagttcgagttcgaggacgacgtgcgtcgtcgtatggagacgatgcagagcgcgcggatcagcctcatggtgctgggtatcgacgacttgcggcacatcaacgaccgctacgaccgtgcattcggcgatgaggtcattcggttcgtggcgcagcgcatccaaagctcgctgcccgaggacgcgcgcgtgtaccgtctggacggcgacgagttcgccgtgatcgtcgatgacgatgtcgacgtgctgcgcagcgcatacgcgcagctaggcggtatgtttcagcgacagcacgatcatgagggccgcaagttctattgcacgctgtccggcggcatcgcgcaatatcccggcgatgccgaaacgtacgagagcctcgtgaagtacgccaattacgcgttggaacacgcgaaagggcatgggaagaagcgctgcgtaaacttctcgcagcctattctggccgagcgcgtgcgcgagctcgagctgatggagctgctgcgggacagcgtggagaacggcttcaagggattcagcctgtgctaccagcctcaggtggaagctgcaacgggttgcgtcgtgggagccgaggcgcttgcgcgttggcgttgcgacgagtatggcgacttgtcgccgctcgagtttatcccgctgctcgaagagagcggtcttatcgttcctgtgggcacgtgggttctgcaacatgctgtggacacctgtaaacgatggaggaaggcgatcccctcgtttaccatgagcgtgaacctgtcgtatcgccaacttgacgaggacggtctggttcctcttatcgtggacacgttgcgagaggcggagctgcctcctgagagcctcgtcgtggagatgaccgaaagccgtttcgccgacgacgcccaggtcactcatgagctgttcgatcagctgcgcatgcaaggcgtgcgtgtggctatggacgatttcggtacgggctactcgtcgttgggcgtgttgaagacgtcgcctgccgacatcgtgaaaatcgaccgcgcgttcatccgcgatatccagacgagcacgttcgatgccacgttcatcaagttcgtggtggaattgtgccacgccgtgggtatcagcgtgtgcctcgaaggcgtggagaccaacgaagaatacgaagtagtgggcggcatgggtctcgattatatccaaggcttcctgttcggtcgtcctctgccagaagaagagttcgagcggaggttcttggaagggagggcatga

SEQ ID NO: 1853 - DNA, 4179 bp, Eggerthella lenta
atgggaatttggaatcgaaaaagactcgctggaggaagaaaaaaccgacggggggggggctcattcgggccttctgagcacgacgccctctcgggtcttctaaaccgcagcggattcaacgtgcgcgtgcgcgcattgatcgacgcccatcccgatgaggcgtatgttcttgtgtacggcgacatcgatcgcttcaaggcgtataacgatctgttcggcacttcggcgggcgatagcctgctcgctgatatcggcgagatgatccgccgcaatctgccgagcaatgcggcggcggctcggttgcgcgccgatcatttcatcggctgcttcccgcgttctctgttcgacgccgatcgcatgctcgccgtgttcaacgactggttcgctgcctatcgtcaggacttcaccttcttcgttcgcatgggggtgtattccatcgacgatcccgagctggacgtcaacctcatgtgcgaccgtgcgctcttggcgctgcgcgccgcgaagagcggttctgcgggcagccgctatgtgctgtacgacgagacgctgcgtgcgtcgctgctgaaggagcagcagctggcgggcgagatgactaccgcgctcgaccgggggcagttcgtgccgttcttccagcctcagtactgctatgcgaccggccgtatgatcggcgccgaagtgctcgcgcgctggaagcatcccaagcgtggtctgctgggtcccgccgagttcattcccgtgttcgagcgcaacggcctcatctcccgcttcgattactatatgtgggatcaggcgtgccgctgcctgcgcgcgtggatcgacgcgcacggtcgcgacgccgtgccgcatctgtcggtgaacctgtcgcgcgccgacatctatcgatccgacctgtgctcgtatctcaaggggctcgtggagcgctacgatgtgccgcccagcctgctgaacctcgagatcaccgaaagcgcgtacatggaatcgcctgaccagctggttggagccgtcatggaactgcgccgcgccggcttcaccgtggagatggacgacttcggcagcggatactcgtcgctgaacacgctgaaagacgtgcctgtggacgtgttgaagctggacatgggcttcctcgatgcgcacgagagctcgcgcggcggcctcatcctcgcctccatcgtgcgcatggcgcgctggctgaacctgcccgtcatcgccgagggagtggaaacccagaagcaggcagcatacctggccagcatagggtgcgagtacatgcagggctatctgttctcgcgtccggtagatcgcgagacgttcgagcgcatgttgatggacggcggtcgagagtccgtcaagcggccgatcattgagaatctgcaggatgatgcatccgagttttggaacgcggattccccggtaacccattttttcaacagctacgtgggcgccgccgccatcgccgaatacgacaaccgaacgttggagatcgcgcgtgcgaaccatcagttcgctgagctgttcggcatgctcgatgatttggacgcggcggagaggatacgcaaggacctgctgacgcagctgttggacgaggatcgtgccgcgctgcatgaggctattttgcgcgcggtgcgcgatcgcggcgactccgagagcgagctgcgtttccgcagcggcggacgagggcgttggatccgtgtccgcatccgtctgctctcgcgcgcgggcaatctcagcaacctctatttgcttgccgaggaaaccactcaggagcaggctttgcgcgatcggctggctgccacgcgcgacaccattccgggcggtctggcgttctacgaggtggcggatcgcattcgtctgttggatttcagcgatgccgctgccgatatgatcggctacactcgcgaggaataccaggcccgcacgttggacgacgcgcttgcggtggtgcatccggaagatcgcgcacgcgtcgaagcggtggctgccgaactggatgcgggtgcgtcgcggtcgtcgtgcactatgcgcgttctgcgcggcgacggcaaggtggcgtggctgcatctttcagcgtcgacgatgtatcgagacgagacggcgctgtacgtggtggccgtgctcatcgacgtgacgaacgagaaggagaatgagcaacgcctcaaggcgcaaagcgagctgcagtgccggttgagcgattccgttccgtgcggcatcgtgcgctatacggtggacgacgagccccgcgtgctattcgtcaaccgtacgggatgcgagatattcgggtacgccgatttcgctgcatatcgtgctgggacggcgggcggtaagatcgtacccatccacgatgacgacgatgagctgcatgccaagacggttgcggcgctcaaggccggggcggcgcccatcggcttcacgtatcgtttcgtgcgaagcgacggctcgatgggatggatcgagggcacgtcggcgctggagcgcgatatcgacggcaggaccgtcgtccaaagcgcgttcctggatgtgtccgaccgccagcagaagcgctacgaacaggatatacaccgttattcgatggtgttgtgctcggtgtacgacgagatcgtcgagttcgatggcgagaacaagacgtaccgctcgctgtactcgtcgggcaggacgctcgccgacagaaccatgcccatggaagaggcgctcaagttctggaccgaccatctgcccgagccggacgatcgcttgcgcctacgtgccgcgatagacgaatgccttgcagacgacggcgccagccctatcgcctgcacctaccgaatggcgttcgaagataggagctgctggtaccagagcattctgctgcgagtgtcggagtcggccgtgctgtgctgcagcaaggacgtgacggaacacgtgtcgaacgaggatcgcaggatcatgatgcgcgtgctggacaccatgggcaagctgccggtgggcgtgggcgtgttcgcgaagcgcgatggcgaggtgcggctgcgctatgccaacgaccgactgagcaccatgttcggcgacgggcttccgggtgcgcccgagaatcccgattgggatgcaccgcttgagctgagcgaagaggtgaagcggctcgatcagcgttgcgtcgaccagggattcatcgcggatgggaacgaattggacgtaggtcttcgtgcggtgcgcgataacggagaggcgattgacgtgcggatccagggtcgcgtagcgcgcgagcctgacggcgagctggttctgtacgcagtggtcagcgacgtgacggcggagctgcgcgatcagcgtgaacgctcttggcagaatgagcgctaccgcctgctcagcgagatgacgcacaagatgagcttcgactacgattcggattccgacacggtgcttttgtacatggatcgcacgggcaagggcatggaagcccaggttgtccctcattatttggaaacgctttcggaaactcgcggcaaaatcatccatcctggcagcatggacgacgtgcgcaggatgttccagcatgcacggtcgggcgccaacgaggtgagcgccgagtatcaggcagactacttcggcaagggctacgcctggtaccgcgccaatctgttcgttgcccacgacgtcgcgggcgtgtggcatctcgtagggttgatagagaatatcgatgacgagcacgatctgcggttccgtgcggaaaacgacgcgacgacggggttgagcaaccataccgccacgcaggatctggttgcctcggcgctcgccgacgcatcggtgcggcggcacagcgtgtgcgtcgcgctcgatatcgacgacttcaagcaggtgaacgacacgtacggtcacattgagggcgatacgttgctgcatgaggtgggcaaggtgctgagatcgagcttccgcgaaagcgacgtgctgggtcgcgtgggcggcgacgagttcctgctgctgctgaaaaacatcgatctcgaagtggcactggacaagctggaacaggtcaagcgccagcttgcagccgtgaaggtcggctcgcagggaaaagccctgtcggtcagcatgggcgtgtatgtgccggaagacgatgacctggcgtaccgcgacgtgttcgtgaaggccgacgaggcgctgtatcgggcgaagcgttcggggaagaaccgcatctgcgtccacggccgctag

SEQ ID NO: 1854 - DNA, 4353 bp, Eggerthella lenta
ttgtcgtcggtgcttgcccgtgcgatcttcccggatgaaagtggtatgctcatggaggcgatgttcggtgaagtcgaaactcttgcctacgtgatagacagtgaatgccgcgtcgtctacttcaacaagaagatggaggttgcgtttcctcatcttgaaacgggcatgctttgctatcaggccttgcgcggcgagcccgcctcttgtccggattgcccgctgattcttgaccacgccagcaagagccgggtctacaaccagcgcatccggagttggatagagacagaggtgagcgacatagactggcctggctcgggcgcgtgccacattttcctgagccgtgtcatcgatcggcctgatttgggcgcggccgatccgaagcctttcgatgccctgacgggcctgtatacgcgcgaagcgtttttctcggcggtctccactgcgatccaagcatatccggagcgctcgtattgcctgatggccgttgacatcgaacatttcaagctgttcaacgaatggtacggcgaagaggccggagatttgtttctggaagaggtggggaggctgctcggcgaggctgcagccgagagcggcggcgtttcaggctatctgagcggtgacgacttctgcatgctgctaccttgcgacgagggcatgatcgagactctgcgagcccgcattactcaaagcgcgcttcatcacggcaaaggcatgggctttcttcccgcgttcgggctgttccgcattgacgatcggtccctgcccgtcggcatcatgtacgatcgcgcgttgctggctttggcctcggtcaaggggaattacgctcagcgtttccgatggtacgacgatggtatgctcagagagatcaaggacgaccattcgcttttgctcgaagtgcagcaggctttggagaagggcgagatcacgttctacgctcagccgaaatgcaacctcgacacgggcaagatcgtgggcctcgaggctctggttcgctggatgcaccctgagcgcgggctcatcccgccgatccagtttatccccatgctggagcgaaatgggctgataaccgcgctcgatctgcatatttgggaggaagtgttccgcgctctgcgcgcgtgggtggacgccggccaggcgcccgtgcccatttccgtgaacgtgtcgcgccgcgacctgtatgcgctcgatgttttgggcacgttcgagggattgatcgaaaagtatgatattccccctcgtctgctcgccgtcgaaatcaccgaaagcgcgtacgtcgaggattgcgagctgatcgtggacatcgtcgagggtttccatgacctgggcatctccgttcatatggacgattttggcagcgggtattcgtcgcttggcatgctgaaggacgtgaacgtcgacgtcttgaaactggacatgaagctgctggacgcgatagacgcgcaaagccgcaaagcccgtagcattctggaagccatcatcggtatggcgaacttgctggacatccgcgtgatcgcggagggggtggaaaccgaatcccaacggcaattgctggtgaagatggggtgcctgtacgggcaagggtacttcttctacaagcccatgccgaaggcggagttcgagcctttgattgcgaatcggacgaaggttgatttccgcggcatccatgcggactccatcgagaggttccgtattcgcgacctgatagagagcagggtgctcagcgatgccatgctcgacgatatcctgggtcccttggtgctgtacgatctgtacgacggcgaagtggagcttctgagcgccaacgagcattactgtcagctgaacggggttaacgccgttgacctgcacgagctgcgttccacgttcgcgcgtcgagcgttcgagtcggattgggacgaggtcatggaagcgttcgagcaagctcgcgagaacgtcccgaatggcgcggtcgtcgtagtgcgtcgtatgcgcccggacgggtcgaccgctcacctgctcgtccatctgctgttcctgcgcgagcacgaaggccactacctgtatctgggttcgctgagggatgtgactcgcgagcggcagcaggcgcgtcagctggagtcctctcgtcgagcgttatcggctgccacggatgcttccccgcgcgatccgctgctcgtagcgttgggggaagagaaccggcgaaccgccctggcgctttccgccgagctttcgcccggaggcatgatcggaggatactgcgagccagagttcccgctgtacttcgccaacgctgctatggtggagcttctgggttacgacacgtacgaggaactggctgcgggcatcgattggcgcgtgggaaacaccatacatccggacgatctggcctcggttgcgctcgacatcgggcccgagtattacgtggggctcgagtacactaccacgtaccgcatggctcgcaaggacgggacgtggttctggacgctcgacaaaggccgggtggtcgaagcggaagacggcaggcttgccatcgtgagcgcttgcaccgacatcaccgaagtcatggcagtgcaacagcagcttgccgagcgaaacaaattgttgatcagtcaaaacgaagagcttgcattcctgaatgaagatatgcccggtggctatcatcgctgcctcgacgctcccgggtgcgatttcctgtacatgagcgaccgctttctggacatgttcggctacacgcgcgaagagataaaggagctgttcgacgacaagtacatgctcatggtgcacccggacgaccgcgacagcgtggccaaaggcgtgaccgcgctcagggagggcactgcggggtcggatccgttggagtaccgcatgagagccaaggacggctggcgctgggtgatcgaccagagccgtttcttggaatacgatgacacctcgttcctgcagggcgtcgtagtggacgtgacggaaaccgtggagctgcgcgacatgatgagcatgctgatcgagcacacctcgagcgacatcgtgctgctgtcatggtccgacaaagaggacgtccgcgtgaacgtggtggcgtgcggtgcgtcgaagaagtacgggctctcgcccgagcagtacgaggatatcattcgcggccagctgtaccttccgagcggagacgggggcgggcgcctggtcgacgagattgtcgacaagatcgatcgaggcgagagcttggcgattgtggatcgaccgcgctttcccgggcgcgagaacgtctggatgcacattgaggctcgccgcgtgggcctcgagtcctttgagcgtatggcgttgtgtttggtcaccgatgtgtcttctatgaagaaccagcaacaggagctgtggctcaccaagcgaaagctggagggggttctggatcaagccggcgtccaaagctgggactgggacatcaacagcaatcgcttggtgctctcgcgcagcgagcttatggagcgtatattcgcaggtctgagccgcttcgaggacgacatgctggtcgtggacgggttcgaccccgagactatggagttccgcttcgtgccgcccgactaccagcaggcgttcagggactcgtttcggggcgtgcgcactgctcgcgatcgacagcgctcggtgttcgagattccgtttacgttcgaggacggggcgcctgtgtggatagaggtcgcgtgcgagacggtgcgcgatgagcgggatcgacccgtccgcgcggtgggatactaccttgacatgactgatcgcaggaacgaatccttgcagaacaaagcgaactccgaggcgttgcggcagctgcgagaacagagcttccagctgctcaagatggcgaagaccgatgcgttgaccgggttgcataaccgccaggcggccatcccgaagatagaggagcgcctacgcgcggtcgaggcgggcgagctgggcgatgcttcgtgtgcgctgatcatgttggatctggactccttcaagctggccaacgacgtgttcgggcacgcgtacggcgatcaggttatcgtgcatgtggccgaggctctgaaggagtcgttccctggcgacgtcgtctgccgtatgggtggggacgagttcctggtgtggtgcgaggacgtggacgagggagcgttggaggataggatcgcctctgcgctgcgtgccatggaggtcgaacgcgttgaggacggtcgaacgttcctgttctcggcgtcggccggttacgtgctggttccgcaggagggcttctcgttcgacgacttatatcagaaagcggattcggcgctgttttcggtcaagatggacggcaagcgctcctgctcgcgattctggtctgggatgaagaccgttcgctgcgagttggccgagtga

SEQ ID NO: 1855 - DNA, 2781 bp, Eggerthella lenta
atggactacgaagcaaggcgcgaccccgatgcgatcctgcggcaaatcgtcgaggaggaggctgccgagggcgatacgcgcggcaagctcaagatattcttcggctatgcggcgggcgtgggtaagacctacgccatgctcgaggaggcccacgccgtgctggaaaaggggttcgacgtggtcgtcggttacgtcgaaccccacacgcgggccgatacgatggcgcttgtcgacggactggagcagatctccccatcgacggttcagcatagaggcatctctctgcgcgagttcgacctggacgccgtgctggcgcgccatccccagatcgtgctggtggacgaattggcccacacgaacgccccgggttgtcggcatcggaagcgctaccaggacgtcgaggagctgctgcgcgcaggcatcaacgtgttcaccaccgtgaacgtccagcacctcgaagggctcaatgacaagatcgccgccatcacgcacgtgagcgtagccgagcgcattcccgaccgtatcttcgaccaggctgcatcggtcgagctcgtcgatatcgagccagacgatctgatcgagcgcttggaggcaggaaagatataccttcccgatcgcgcccgcacggcgctcggcaacttcttctcccggaagaacctggcggcgttgcgcgagatcgcgctgcgccgcatggccgatcggctgacgcgcaaggccgaatgcaccgaggcgggcgcgcgcgtggaggccggcgaggacgtgctggtgtacgtaacgcacaatacgggcaacgtgaaagccatccgggccgctgcgaatatggcggagtcctaccatggggcgctcactgcggtggtggtcgagtcgtcgcagagcaagaagttcgattccgaccagcgcggacgactgcgcgccaacatcgatctggccgaagagctgggtgcgcacgtagtcacgctgttcggtgacgatatagcccagcagctggcgcagtacgcggtgacggccggcgcgactcatatcgtggtgggcaacgccacgggtggcctgtcggtgcgttccctgctgcgcgagagcctggtgagccggctgatgaagctcgcgcatggggccgtggtcgacgtcgtgccgacgaaggacttgcctgcgcaatatggccggctgtccgaagccacagggtttcgcctgacaggcgctgacgtttggcgtgcgctcgcgtcggtcgccatcgccacggctatcggactggccatctattcccttgggttggccggttccgtcgtgctcatgctctacctcatcgtggctctgctcatcgctacgcgcgccgacggcttcttctatgcgctgttcgtgtcgatgggcagcgtgtttgcatacaacttctttttcaccatcccgcggttcacgcttcatgcggtagggctgaactatcccatcatcttcgcgtttctgctcgtgggcacattcgctgcatcatcgctggccatccgcatgaagcgtcaggccgagagcaccgcgcgccgtgcgtatcgcatggaagtgctgctggaatccagccgaaagctgcagggtgcccgcaatgcggacgagtgcttccggcttgcggccgagcaggtcatcaagctgctgaaccgcccggtggtcatgtaccgcttgggcatcgacggtcgtcttgcgaagcccgtggtgcacgacgtccctgggacgctgggcggcgatgccggtgcctgcgcgctcgcatcgcccgaagagtccgcggtcgccgcatggtctgcggcgaacaacgagcgtgccggagccactaccgacacgctcgccgattcgcaatgcctgtacctgcccatccattcgaaggacgctgtgttcggagtagccggcatcgcgatggacgacatcgacggggaggaggacttcggggctttcgagaagaaccttttgctggccatcctggacgaatgcggccagactaccgagcagatcgtcttcgccgaggataggcggcgcatggagatgcgcatggagaaggaaacgctgcgggcgaatctgctgcgcaccatctcgcacgacctgcgtacaccgttgaccagcatttcgggcgatgcggacatgcttttgcacgatcgcggcgcgctgtcggcgcagcagaaggagcacttgtaccgcgacatccacgacgacgcgtgctggctggtcacgctcgtggagaacctgctgtccatcacgcgtatcgacaacggcacgctgcagctggccgaacagcccgagctggtggcggatgtcgtgagggaggctctccagcacgtcgatcgccgcgctgggagacgccgcgtcgacgtggagttggaagacgagctgcttatggccgacatggatgcgcgtttgatcgtgcaggtgatcatcaacctggtgaacaacgcggtatcgtacacgccggccgacgggcgcatagtcgtgagcgcgcggcgggtcgtggagcacgatcgtccgcgggtgcgcatcgcggttgccgacgaaggcccgggcatttccgaggaagatcgcaagcatatcttcgacatgttctacaatggctccaccggccggcggggcggaaagagcggcgatttcaagcgcggcatgggcttgggcttgtcgctatgccgttccatcgtcgaagtgcacggcggcactttagacgtgcgcaatgtgaacccgcacggtagcgagttctcgttcacgctggcagcggtggaggccggggacgtggtggcgcgatcgacggaggaagcgcgtggctga

SEQ ID NO: 1856 - DNA, 1683 bp, Eggerthella lenta
atgagaaacatgcgactgaaggccgcgcttggaatggcgggggtgttggcgatgactgcagcttgctgcgtggttggtccggcgcttgcggccgattctgcgtcgactgcagacgaaatagtgcgcggaggggagccggacggcgatgttcagtatcccggcaaagagtacatcgtcgagaattacgacaagtgggacaagatcgccgaggagtacgcgcccgagatcatccgatattcgaacgggcagctggttcagcgtaccccgaccgagtacgagtgcccccattggatgcagcaaagctggaccatttcgtacaacacgtactacctcgacgcggacaaccgagggtgcaattcgtgccatgctgatatgaatgcgatgatcgagaacatggagtacaagcatgccacgatcgacaacaaagcgctcgagacgtacagcgacgtgaaccagtgcatctcgtgccatcgtgacaacggcgacgatttcggccgcctcatacatgccatccactacaacgagcgcagcgggaacaagttcgccgagggctcgaacggcacgtgtcaatcgtgtcacgacgcgactgcggatggcaacggcatgcagctgtgggacaacgtgaagcatgaggcgatgcaaggcatcaacaaggttgaaaacgtgcagggcgagttcgcatccacccaggacaaggtgcagacgcaagacgagctgtacagctacgacttcgttcacggctattacgaccatatgcgttacgcatgcgggcctaacgggcttgacatcgacctgccccagagcatgttcgacgagtgggagttcacggtcgacgggaacgtgaacgcgccctacacgaagaagctgcccgagctggtggccgaagctgaagccgctggcgtggtggtcacgaagccctcgaagatggtgtgcgagctgaatccgatcggcggcggcggaatcggccaggccgagatcaccggtatcccggtcagctggctcatcgagaaggctggcggctacaccgaagacaccaacagcgtgcgcgtcattcgcgcagacgggtcttcgcgcagcgggttcgacctctcggtcttggacaaagggtatctggtgtacaagatcgatggcgaatacctcagcgcacgtcacggcttcccggtcatgcattggcaggagacctacgatgcccagatcttctcgaagcagatcaacggctaccacgtgtcgtccgatgtcatgaaagagcgtgtgtgcggccaggtcaaccaagaggatgcccatgtgaaccgtcccaacgtgacggtgtgcggcgtgcccgaaggtctcatcatccagaacggcaagccgttcacgttcaacggctatgccgacgcgttcgaccatcccatgaagacggtggaattctccatggacggcggcgagacgtggacgtcgttcgacgtgggagacgtcgatccggcgaaatggctgtggtggagcttcacgttcacgcccgagaaagaaggagcgtacgtgctgagcgtgcgcggcacggacgtcgacggcgaagtgagctaccgcaaccacgaggtgctggtgaacgcgaaggacgagatgccgtccgaagacgagatcaccgagatagggaagatcgtcgatccggccatggccaacggcgatgcttccggcgatcagcagtaa

SEQ ID NO: 1857 - DNA, 2727 bp, Eggerthella lenta
atgggcaaagacaagcgcaaacgcaaacgacgcataacggcatcaatcgcaatcgtcgccattgtggcggcgattgtttctgctgtgctcggattaacgtcttttatcgacaagaagctcaatcagagcgccgagcagcaggtggtcacgttcaccgagcaatccgccagcaacgtaaccgaccgcatgtacatgtcgcagaacgccatcggcgcgtttaccgtgcagactaccgatcctgcgttggttgcgccggctctcagcagcttccaggagcaccacggctttgcgaatgcgacgtttgccgggatggacggtcgaggcgttcgcgcggatggctccgcattttccgtcgacgagctggctcagcccgaaacggctttgtccgagggtcgcagttcgtactctgccacgttcgccaacgaggcgggcgcccgcgtgcgtctcgcccaaacgccgctttatatcgatgggcagcaagtcggagccctgtacgtgcaggtgccgttaagcttgttctctatgtcccgtcagctggatatgttcgacggccgcggctacttcatgttgttcgagggttccaccggcgaggtgctggtgcctcccacgggcgaaaccaagacgccggtgttcatcggcacgtcgctgtacgacttccttgaccgggcgtctcagtacagcgagccggcctcgaacaccgatgccgcggtctcaaccgaagctgccttgcagttcatgcagtcgcgctcgcggagcgacctttccacgctgcgcgacgttgtggcgaacaagcagacggggctgctcacggccacggtagacggcaaatccagttatgtgtgcgtcgcgccggtcgacaacgggtattggtacgtgtgcaacgtggtgcccgtcgagaacgtgcgtgccgaagctgccgtggtcaccaccacgttcgaagcggtgttcgccatcatcttcgcctgccttgtggtggtggcgctgttggtgttcggcgcgtaccgccgccgcctgcgcgaacagaacgtcgccatgctcggccagttgtacgaggcgctgtccgacagcatcgatatggcggtgaacctctattcgcccaccgacggcaaggtcactcccattgtggcgaaggccgaacgcatcatcggctatcgccttgacgcctttctgcaaaacgagcggttggcggccaccatagggctttctcccgagggcgtggctctgttcgatcgcattaggaaggacgagacgaagggcttcgagcaaggggagttctcgttccgcagcaagcagaccggcaaagaatgctgggcttcttactcggtcaagcggctgacgttcgaagataagccgcagctgctcgtggtcatgcgcgacgtgacggccgacaaggagatccaattgtccatgaaggatgcgatggacgttgccgaggcggcgaatgctgcaaagtccgagttcctctcgcgcatgagccacgagatccgcacgcctatgaacgtgattctgggaacgctgcagcttgcgcggagcaatccggacgatcgcgagaaagttgccgagacgctgaaaaagataggagacgcatctgaccatctgctcgggctgatcaacgacgtgctggacatctcgaaaatcgagaacggcaagatgaccctggccagcgagcctttccgtctcagcgccgtgctgtcgcacgtggcatccgccgttcgcgtgcagtgcgaacagcgcgcccaggaattcgtcgtgacaactccgccatgcgccgatgccgtgttcgtgggcgatgcgcggcgcatcaagcaactgttgctgaacttgttgacgaatgccgtgaagtacacgccctgcggcggctgcgttcggttcgagaccacggtggcgaagggtgccgccatggggtatcgccaggtgaagttcacggtatccgacaacggcataggcatgtcagaggagttcaaggagcatattttcgagccgttcagcatggagggacgctcgcgcgagcagggcacgggcctcggcatgcccatcgtgaagaacatcgtcaccatgatggcgggcgatatcgccgtcgagtcgacgaaagggcagggcactacgttcacggtgacgttcaacctgcgtatcgcattagaggcggagcgcatcgtgttcgaggagggcgagggcgccgaggcggacgatgcgcagcccctcgaactcgatgctgcgagcgcggcggcgctgcgatccctcggcgcgcgcgatcggctggcgagccgtcccgtttcggcttacgaagcccctatgccgggcgcgccgcgtgcgctcgaccgcaccgagttcgaggggctgcgcgttctgctggccgaagacaacgacctcaacgccgagatagcctgcgaactgctggcggaagcggggctggtagtggagcgagcgggggacggagccgaggcgtgcgtcatgttcgaggcgtcgaagataggctacttcgacgcggttctcatggatgtgcagatgcccaacatgaacggctacgaggccacgcggtgcatccgcgagctcgatcgcgaagatgcggatgccgtgcccatcatcgcgatgtcggccaacgccttcgccgaagacgtgagcgcctcgttggccagcggcatgaacgcgcatctgtcgaagcccatcgacatgcgccgcgtgctggccaccctcatcaagtacgtgcgaaagcgctatgaaggataa

SEQ ID NO: 1858 - DNA, 2151 bp, Eggerthella lenta
ttggaacacgagtatgaaactcccgaactcgatcaggaattcgaccccgtattcgaagaagagcagcagcatctgaccgaaacctatgccaagctgcagaccatgggtcgcgatctgctggcgaagatggaggctaacagcaaagacgcggctgccgacaagctggccatggtcgacgagctgtcggtgaacctggccagctacgccgacgccatggaaacctatgccgacttcgccacggtgaaccgcgtcatcgacgcgtacaacctggcgcaaaccgtcgatgcggaaaagctgaccagcatccaggtgctgctcaagcaaccttatttcgccaaggtggttctgcagatgaagcctgggcaggagccgaaggagctctacatcggcaccgccggcatcgccgacgagaactaccgccgccttgtggtggactggcgctcgccggtggccgaggtgtactacaaccaggagaacggccccacgtcctacgaggccaacggccgcaccatccgcgtcgatctcaagctgcgccgccagttcgacatcgaagccgatcggctgaacgcctacttcgacacgaccgtcgccatccaagacgccatgctgctggcgtcgctgtcgaagcgccgcacggcgcagatgcaggccatcaccgccaccatccagaaagagcagaaccaggtcatccgccacgcggacgcgcccaccttgctggtgaacggcatcgccggcagcgggaagacgtcggtgctcatgcagcgcatcgcgtatctgttctaccagcagcgcgagagcctcgatcccagcgaggtgttcctcatcacgccgaacccggtgttcgagcgctacattgaaggcgtgcttcccgacctgggggagcgcaatcccgaatgcctcacgtgggatgagttcctgcgaggcctcatgccgcccgaacggtccggcggacaggcgcctgcgtcgctggacgcgttcgagcgcatcgacgaagcgtgcgcgacgttctcgttcgaccagcatgatttcaaggagatccactgcaacggcgagcgcctggtcacggttggacaaatcctccaagtagcggccaagttcagaaacatccctgctggcccccacctggtcacgctcatgcgcgaggagctgctgcggcgtctggacagccgcttgaagcagctggcggcctcggacaaagtgctcgacgagatctcgatgcttaccctcgaccagcaggtggagctgttccgcgaaacgttcgacccgcacgacgagagccaggtgcgcgaagtggcgcagcagtacgtcgatttgcggttcgccgacgcgcgccgagccgtcgagaacgacgactggctgcgcatcgaccgcatcggcatgcgccttctgggcgtggagaacctcgttccggtcgagtggctgtacctcaagatggcgctgacgggcctcggcaacgcagatgcgaagtacgtgatgatcgacgaggtgcaggactacacggtggcccagctggccgtgctggcgcgctacttcaagcgcgcgcacttcctgttgctgggcgatcagaaccaggccatcgccccgggcaccgccacgttcgaccaggtgcgcgcgctgttccgggaggtgcgcggcccgctggaggagtgccgcctcatgaccagctaccgctccacccccgagatcacgcagctgttcgccagcctgctggacgatgacgagcgcctgagcatctcgtccatccagcgcgccgacaccgcgccggagatcatcgcgtgcgcaagcgagcaggattacgaccgtgagttgcggcgcgttcttgctcaagcggtcggcgacgacggcctcactgccgtggtggtgccgcagaagcatcaggccaagctgctgcggaagaagctgggggacgcggctcccgcgctcatcgacgcggccgccacgctgcccgccagcggcgtagtgctggtgccactcaagctggcgaagggactggagttcgaccacgtcatcgtccccgacgccagcgagcgcgcgtttcccgacgacccgctgtcgcgccgtcgcctgtacaccaccgtttcccgtgccacccgcggcatcacgttgctcgcgcaaggcgagattaccccgctgctggccgcgcgggcgtag

SEQ ID NO: 1859 - DNA, 2733 bp, Eggerthella lenta
atgagtcagctcaacatgtcgaggcgcgggttcgtgaaagccgcagccgccaccggagcgcttgccgcattcggcgcgacggcggtcgacggcgcgacgttccgcgaagcgcatgccgacgagacgacctcccaaacaaagaaggtctacacctcgtgccaagcgtgcatctgcagctgcgccgtcatcgcgacggcgcgcgacggacgcgtcattcggctcgaaggcaatccggaaagccccatcagccgcggaggcctgtgcgcgaagggcctttcgggcatccaagcgctgtacaacccctgtcgcaacaagtaccccatgaagcgcgtgggggagcgcggcacgaacagcttcgagcgcatcagctgggatcaggctatcgaggagatcgcgcagaagctcacgcaggacttcttcaagtacggcggcgagtcgctggtgacctctacgggcggcggcgggaacccgcacttcagctcgccgtgtcgcttcacgcaggcgttgggatcgccgaacatcttcgagccgggctgcgcgcagtgcttcctgccgcgcatggccacgttctcgctcatgtacggcggcagcaagtcgggcaccacgtcgatggccgattccaagtacggcggctgttcgtcgctgtacttcccggaggacaatcctatccagacgctggtcatgtggggcacctgcaccagctaccacgcgcccagcggttcggggcgcgccattgccgagctgcgcgcacgcgagcaggggctcaacatggtagtggtggaccctcgcttcacgcccgatgcggctatggccgacgtgtggctgcccattcgtcccggaaccgacgtggcgcttatgatgacgtggatccgctacatcatcgagaacaagctgtacgacgaagatttctgcaagcgttggacgaacctgccgtacctcatcgacaccgatacgaagaagatgctgcgcgcctacgaagtgggcctgggcgaagccgatgcggaagatgcggaaaagacgttcgtggtgtgggatcagaagacgaactccgcgaaggcgctgccatggccgtacgacgaagcgctggaccccgcgttcttcggcacgtacgagatcgacggcgtcgaataccccacggcgttcacgctgctgcaggagcgcgtggacgaatggacgctcgaaaagggctgcgaggtatgctgccttgagaaggaccaggtggagaaggccatccgcatctacgcggagaacgcgccgtccggcctggttctgggcgtggccaccgacatgagccctcagtcggcccagggtacggaaggcgcctgcatcctggagttcttgctgggcaacgtggagaagccgggcgcgctgctgcagcgtttccccgacccgccgaacaaggtggatctcggcactatgaacacgctggtcacaggcgatatgctggagaagcgcctagggtatcgcgagcacaagggcctgggcatctggtcgcatgcgcacatccccacggtgttcaaggccatcaccacaggcgagccgtaccagccgcgcaactggatggaacgctctggcaacaagcatgcgatgatcggcaacgcggggcagctgtccgagatcatcgacaagatggagatgatctgccatctgtacatgtaccccacggccttcaccatcgaagcggccgattacgttctgcccacgcaggagtggctggagagctatttcaccatcgcccatgcgaacaagatcatcatccgccagccggtggtgcacttgtacgaaacggtgaacgagggcgtcatttggtcggagatcgcgcatcgttgcgccgagctgggcaatccgttcgctcagaaggccttcgacaaggaatacctggcaacgctgggcaccgatctggtgtactggcgcggccagcaggaaatgatggacttccatatgggctcgctgcctatgagctgggacgaactggccgagatgggcgcgtacgagtggatctccaaggaagactacctgacgtattacacctacaagaccatcgatccgaagacgggcaaggagaagggctggaacacgccgtccaagaaggtcgagccgtattcggaaggcacgctcatgctaggccgcacgggcgagccgtgggcgagcgccgagggcaaatcctacgtcatgccgccggccgacgaagattacgatcctttgatctactatctggagcccgaggagacgaacctcaccgatacggaatatcccatcatgctgacccagggacgcattccgcactaccatcacggcacgttgcgcaacattccgtatctgcgcgagctgtatccggtgccgctggtcagcatccatcccgagaccgccgagaagtacggcgtggaggacgagcagtgggtgtgggtggaaagccgtcgcggcaaggtgcgcgggaaggcgcatgtgacggcgggcatcgcaaaagacgccgtgcacatggaacgcttctggaatcccgagtacctggacaccgacacgccgagcaaggcctggactgagatgaacgtgaacatcctcaccaagaccgacgggcgttacagccccgagcacggcacgtacacgctgcgcggcttcacggtgaaggtgtacccggctcccgaaggcgcgcctgaaggcgcatggatcaacccgaccgatttcgaaccgtggatgcctgaattcagcgaatccactgaggtggtgttcaaataa

SEQ ID NO: 1860 - DNA, 1560 bp, Eggerthella lenta
gtgaaacgcgaggagatcaccgtgcaggcgaagctcaagcccaattgcgggctcgagaacacgcgcgcttcgctcgtcatgcgccgcatcgcgccgttgtgcgactcggcaacatgccatccgcacgcgatcaagagcagtcgagagacgattccctacctgcgagaccacggcttgttcgtcaccttcgtctcgcgcacgcccgagcgggtgctcgcagccatcagcggtgcgttcttcgtggacagctgcaccatcgtggaggatcccgaaggcatcccgccgttcgagatgccttccgcaccccaggaagacgatgcagaaaacggagggatcgaagcgatttcttcgttcgccgatcgcgatgcgcgcagcgagcgagacgaaaagctgtcgaacctgatcgcgcagctggaggagacgaaccggtctttgcgagcgcacgccgaaagccttccgaacgaccgcgtgctcagcgatatcgcgttctcgtacgcgcagaccctcgaccacctgcgatccaccgtcgccctttcgcgcatcgaagcgttcgaccgcatcgccccatcgcttcataagctcgtcgaggactacgggcgccagttcggcgttcccgtcgatctggagctcgagcaaggacgcatggatctggatcgttcggtgctcgcatccatcgaggaaacgctcagacgcgcccttcgatcatgtatccgcgacggcatcgaaagcgccgaggaacgcgccgacctgggaaaaccggaacgcgcaaccatacgcttgcgcctggaaaacgaaggctcggatgtcgtttgccgcatcgagcacgacggcaggcccttcgacgcgcaccgtatcgccacgatagcgtcgaaacgcggccttctcgcccgtccgctggacgcgtattccgacgaggagataggcgcgttcatccttctgccgcaattcttcttgccgagcgccgccagcgatggcaacgccttcgcagaactgaacgagataggctgcatgctgcagcgcatcggcgggcgcggcacgatgcgcaacaccgaacgcggcacgttggagatcgtcctacgctttcccgtgccgttcaccgtgttcgaagccgccctgctgcgcaccggaggcgtccgcttcgcagttcccgcacagcagatcgtgcgcttcgaggcgttcgaccccgcccgcgtccagcgcggcggcgcagcgggagaagggtcgaaagcaacctcaacctggtacgaggacgaacacggcgcgcatattgagatgctcaaccaaggtgccaagccctttccgcttgacgcggcgcaccccgcatataccgtcctgcttgaagctctgggggaacgatacgctttggccgcagacgacgttgagggctacgagcggatctcgatgctgcagcttccggcactgctcgaccgccggtgcatgcacgaactgagctacatcggatacgccatcctgcaagacggttcaccctgcatcgtgataagcgtacggcgctttctgaacgacgcggcgaaggacaggggaacccatgcgcgaccgtag

SEQ ID NO: 1861 - DNA, 2409 bp, Eggerthella lenta
atgggcaagagcaaccatgaggagctgctgggcggcgcgcccgaggcgacgtcgaacaagcagaccgtggaggacaacctgctgggccggccgcacgtggccgagaaatcgttcgcgcccgaagccaagaaggacgccctcgcgccgaagactcccgaggagcgattcgccgagctgcagcgcctgacctcggtgtacctgtccgaggacgacgaggccatgctggcgaaggccttccgattcgcaagcgaggcgcacgagggccagtgccgcaaaagcggcgagccgttcgtggcacatcccgtggaggtggccatcatcctggccgacttgcgcatggacgtggaaacgctgtgtgcagcgctgctgcacgacaccgtggaggacaccagcgtgacgcgcgaccaggtggaagcggagttcaatccccaggtggcacagctggtggagggcgtgacgaagatcacgcgcatcgaggtggaaagcctcaccgacgagcaggccgccaccatccgcaagatgttcgtagccatgagcaaggacatccgcgtcatcgtcatcaagctggccgaccgcctgcacaacatgcgcacgctgggcgcgctgcgtgaagaccgccgcatcttcaaggcgcgcgagacgctggagatttacgcgcccatcgcgcaccgtctcggcatcaacaacatcaagtgggagctcgaggacctgtcgttctactatctggaaccgaacaagttcaagcagatcagccgcatggtgactgaaagccgctctgagcgcgagggctatctcgaccagatcatctccatcttgcacgacgagatggaaaaggtgaacatccaggcgcagatcatgggccgcccgaagcacctctactccatctaccagaagatgacgaagaagggcaagggcttttcggagatatacgacctcatcgccgtgcgcgttatcgtgaagtcggtgaaggactgctactcggctctgggcgcggtgcacacgctgtggcatccgatgcccggccgtttcaaagattacatcgccatgccgaagttcaacatgtaccagagcctgcacaccacggtcatcgggccggcgggccgtccgctggaggtccagatccgcaccgaagacatgcaccggcaaagcgagtacggcgtggcggcgcactggcgctacaaggagaagggcggcaagagcggcgacgcgctggaccagcagctggcgtggctgcgccagatggtggactggcaggacgagtcgcaggattcgcgcgagttcctgaaggacctgaaagtggatctcgcgcccaccgaggtgttcgtgttcacgccgaaaggcgaggtcatgagcctgcgcgctggttcgacgccggtcgatttcgcctacgccatccacaccgaggtgggcaaccactgcgtgggcgcgaaggtgaacggcgccatcgtgccgctgacctacgagctgcagctgggcgaccgcgtggacatcctcacgcagaaaagcgccagcccttcgcgcgactggctgggcatcgtgaaaacgcccagcgcgcgcagcaagatccgctcgtacttcagcaaggtcagccgcagcgacgatttgcaattcggccgcgacaagctgacccgcgagatgcgcaagcacggtctgggcatatccagcgcccagtcgatgcgcgccctcaagtcggtggccgaccacatgggctacaaggacgccgacgacatgctcgtgcacatcggcaccggcaaggaaagcgcccagcacgtggcgaaccgtctgctgaagatcctcgtggacaagggccacgaggccgagaccgccatggactacgtggcaggcgacatgtccaccggcaagatgccgccgatgctgaccagcgtgaaggcgccgaagaagcacgaggcgcacacgtcgaacggcgtggtggtgaagggcgtggacgacgtgctggtgcgcctgtcgcggtgctgcaacccggtgccgggcgacgagattctcggcttcgtgacgcgcggccgcggcgtgtcggtgcaccgcgccgactgcccgaacgctcaggatctcaagcaaacccccgagcgtatcatcgaggtggcctgggagaacgatctgccgaagaacacgtcgttcaaggtggaggtgttcttggacgcgctcgaccgcatgaacctgctgcgcgacgtggccatcatcctgtcggagcaaggggcgaacgtgctgtccagctccaccacgtcgcatcgcgacggcatggtggagatgcggtttttgttccaggtgtccgatatcaaccatatcgatatcgtactgagcaaactgcgcggcatcgaaggagtgttcgacgcgcgccgcatggttcccaaggccggcggcggcaagaaaaagactaggagcgacgcatga

SEQ ID NO: 1862 - DNA, 2946 bp, Eggerthella lenta
atgatgtttgcctgggcgttcgtcatcgcgttcacctgtacggtcgcaacgaccacgtatcccggatcctcgcgggctttcgccgacgagttcgccacgttcggcaagcgcgtcgtgaccgtcacctacttcgaagacggcgactatatgtccaccgacgaagaggggcgctacgttgggtacaacatcgagtatctcaacgaaatcgcacgctacgccgactggacatatgaatacgtcaagtaccctagttgggaagaggcctgtgccgcgcttgaagcgagcaaggtggatctgcttcccatggtgtactacaccgaagaccgagagaggcggatgatcttctcggcatcatcgctctgcgagatttccaccacgctcaacgtgaggctcgacgacacgcgttacgcctacgaagacttcaaaacgttttccggcatgcgcgtgggggtaatcgcgaacagccaggacgccgaagcgttcgcacaatacagcgagaagaacggcttttcggcggatatcgtggcctacagcgctaccggagacctgctgagagcgctcgacgaaggagcggtggatgccattgccatcacatatctcgggacgaattcgcgcttccgaaccgtagctcagttcgcccccgagcctttgtacatcgccctctcgcccgaacgcaccgacatagccgatgagctcgacagcgcgatgagccgcctcaaactgcgcgaccccgacttcgccacgttgctgtacgaccgctacttcggcatcaacaccgaccaggatcccgtcttcaccgaagacgagtacgcctatctggcgtcggctcccaccctgcgcgtggcctacgattcgtatcgcgcgccgctttcctacaccgaccccgaaaccggcgcgttcgccggcgcggtcgcattgctgttcgaagacatcgcgcagatcaccgggctgaagttcgaattcgtggctgcggactgccacgacgaggccgtccgcctcgtcgaacgcggcgacgccgacatcgtgtacgacgtcgatcgagaatccgacccccaggcgatcaaaagcctcgacaccaccggcccctatctgcgcgaccccatggcccttgtcgcaggaccgaatccttccggttcgcgcgtcgcgctgccaagcggcttctcgctcgccgcgagcacggcgtactcttcgtacgccgaatacgacatcgtgtactgcgacaccccgaaagattgcttcgatgcagtgcttgaaggcaaagccgatatcgcctttgccgatacccacgtggcgaactacttgctggcggaaccccaatacgagagcctgagcgtcaccaccatcacctccttcttcaacagcatgagcatcggcgtgagccgcaacgccgaccgacgactggtgagcatcctcgaccgctgcgtgcagtacaccgccgaaagcaagatgaccacctggctttcgcaaagcagcctcgccgtacatcccatcagccctttcgacttcttgcgccagtatccggtgcaattcatggccggcatcgtcgcactgctcggctccgtgctcggcgttgccctgtacgtcagccatgtgaagcttcgcgcggcgcggcgagtggaggacttctcgttcaccgatccgctgaccgaaggctggagtctcgcccgcttccgctccgaggtgggcgctcagatggcgaacgcccgcgatggcgcttacgccatcgtgtacctcgacgtaaaaagcttcaaaggcttcaacgcagcattcggctacgccacgggcgatcgcgtgctgctcgacctcaacggcacgctggccggcatgaaagcacccgacgaacgatacgcgcacgtcatcgcagacgaattcgtgctgttggttcgctggagaggctgggacgcgctgctggagcgcttcgatgaactggatcgtcgcttcaacagcaccgaaacgcttaccgagctatcgcaccggctcatgctgcaggccggcgtctgcatcatcgagcgcagcgccgaaacgccgcgcatcgacgtgcaaaccatcatcgagttcgtggacgccgcacgctacgcccgggacagcatcggggaggcctcgcgcagcaccgcagcattgtactcggcgagcatgaaggatcgcgacatcgccgaacgcgcgctggtggccgccgcgcacgacgcgctcgagcgcggggagttcacggcctattaccagccgaaggtggaaatagcgacgaaccgcctcgtgggcttcgaagcgctcgttcgttgggaatcgcctgaacgcggcctcgtgccgcccgacgagttcattcccctgttcgagcgcaccggcctggtcgtcgacttggacttgcaggtatttcgcctcgtctgcgcccgtatccgggagcagctggacgcgggagaacacccgctcgtcatcgcctgcaacttctcgcgcttgcacatgcgaaacgacgcgttccctgaaacggtgaagagcatcgtcgacggattcggcgtgcccatcgagctgctggagctcgaactgaccgagaacatcgtcatggaagacctcgaacgcgccgaacgactgtgccgccgtttaaaggatctgggcttccgcatcgccattgacgacttcggcagcgggtactcgtcgctgggcacgctgcagaacctgccgatcgacgtgctgaagctcgaccgcagcttcctcatgagcagcgagagcggcgagcgctgcaaggccatcctggacggcgtggtgtccatcgccgacaagctggccgtgaacgtggtggtggaaggcgtggaaacgcgcgatcaggcgtccatgctcgtgcgcatggacgatcgcatcatcgcgcaggggttcctctactcgcgccccgtccctcgggacgtctcggacgcgcagttcgccgtcggcttcatcgagccgaacgaacgcccgtag

SEQ ID NO: 1863 - DNA, 3534 bp, Eggerthella lenta
gtgaaaagcgcgttcaacactgagaccctgcgttcgatcacccactcgctcgggcgcttcctggccatcgcggccatcgtcgcgctggggacgggcttctacgccggcctgcgcatgaccgcgcccgatatgaagctggcggccgacgagtacttcgacggcacgtcgctcatggacatccgcgtgctttcgaccctcggcctcaccgacgacgacatcgcggtgctgcgccacgtcgagggagtcgaggccgtgatgcccgcgcgcgagaccgacgtcatggcgtccatcgacggcgaacagtacgccacgcgcgtgcattcgctgcccgatgcggcgcgcacgagcgacacctccgacggcgtgcatgcgcgttccgacgaccccgactatctgaaccgtcccctcctcgtccggggttcgtggccgcagaagacgggggagtgcgtgctgtcggccaacctcgtggagaacgacgccatcgccgtcggcgacacgctgaccatcaccgagggcgtgcaggacgtggaccagaccctcgtcacgcgcacgtacacggtgacgggctttgtgaacgctccgtactacgcaacgtcttcgagcatgggcgagaccacgctgggttcgggctccatccaacagtatatgtacgtgcccgagagcgacttctcggccgatcttccctataccgaggcgtacctcacggtgcgcggggcggcgaacgaacgcgcgtcgagcgacgcctaccagcggctcgtagacgaagtggcggatcgcatcaaggcgcttgcgcccgagcgcgagcaggcacgtgtcgatcagctgaagtccgatgcgcagaaggagctcgacgagaagcgcgccgactacgagggcgagagggccgacgcgcagtcgcaactggacgatgcgaagcgccagctcgacgatgccgccgcgacgatcgccgcaagcgagcaggagctggccgacggccaggcggcctacgacagcggcgcgtccgagctggcgagccagcgtgcgagtgctcaggcgcagctggacgatgccgaacggcagatagccgacgggcaggcgcagctcgacgcgcagcgcccgcagttggatgatgccgcagggcagctccaagcggcccgggctcagtggcaacagggcgccgacgccctcgcggcggcgtggggcgattggcagcggcgatccgacgagcttgacgcgggcataactcgggcgcaggccggcgtcgccgacgcagcggccggcgtcgaccggatccagaagggcatcgacgcgctggaggagcagatcaagcagctcgatcccgacaaggacgcgcagaagatcgccgaactgcgcgccgagcaagatgccctcaaagcgcaacagcaggatctccgggcgcagatggctctcgtccaggccaccctcgacgatctcgtcaacgtgcagaagcccaagctggaggcagcgcgtgccgagctccagggcaagcaggacgccctggactcttccaaggtcgagctcgaacagcagcaggccgcctatgaaggggggaaggctcagttcgacgcgagcgcccggaagcttgatcaggcgcgcgccgatctcgcctcatcgcgctcgcaagccgacgcgcagatcgccgcggctcagcagcagctcgacgacgccgcctctcggctgcaggacggccgcgcccagctcgaacaaggtcgcgccgactacgacagcggcctcgccgaatacgagcagaagaaatccgacgccgatgcgcagctggcggacgccgagtgtcgtctcgacgacgcccagaagcagatcgacgatctggagcgccccgaatggctggtcatggaccgcacggcgaactacggtgcagccagcttcgaggcggacgccgaccgcgtggacagcatcgccgcggtgttcccgttcatcttcttcctcgtggcggctctcgtggccctcactaccatgacgcgcatggtggaggaggagcgtgctctcatcggcacgttcaaggcgcttggctaccgtcgcacgcgcatcgcctccaaatacctcgcatacgcagccgcggccagtgggatcggcagcattctgggcatcctcgcgctgtcccaagtgctgcccgccgtcatcatgaaggcctacggcatcatatacttcgtgcccgagctgccgctgccgctgcccgtcgatcctgggttcgccgggcttgcagccgggctcggcgtcggcgtcacgctgttcgccacctgggccgccgtcgccgccaccttgcgcgagcgcccggcgcagctcatgctgccgcgcgctccgaaggcgggcaagcgcatagtactcgaacgcatcggtccgctgtggcggcatctctcgttctcgtggaaagtgacgttccgcaacctgttccgctacaagaagcgcttcgtcatgacggtcatcggcatcgcgggctgcacggcgctcttgctgacgggtctcgggttgtccaacgccatcaacgatataatcgacaagcagttcggcgagatcacgaagtacaacgccgtcgttacgctggcggacgacctatcaagcgaagagcagcggcgtatcgacgacctgctcgacgacggctcgctcgtcaccgcgcatacgctggtcatgcggcagaacatgctggccggcgggccggacgagcaagacaagcgcatggagctggtcgtgcccgaggatccggcatcgttcgaccgcttcgtggccttgaacacccgcgtcggccatcatccggtgaagctggacgacgacggcctcgtgctcaccgagaagctggcggcggagttgggcgtgcgcgcaggcgatgccgtcacgctgaccgagcaggatgccatcggcaacgcgaccggcacgtcatacgaggccacggtcacgggcatcgtcgagaactacgtgtaccattacgcctatatgggtcctgccctctacgagcagcttatgggcaaggctcccgactaccgcaccgtgctggccgtcaccacgtccgaccccgacttgcgcgtgcagttctcgaacgaccttctggccgcaggaggcgtgaagaccgtggcgtacaacgacgagaccatcgacgcgtaccgcgacatgatgtcgagcgtgaacatgatcgtcgtggtgctggtcaccgcggcggcggcgctcgcgttcatcgtgctgtacaacctcacgaacatcaacatcaccgagcgcatgcgcgagatcgccaccctcaaggtgctcggcttcacgccgcgcgagatgaacgcttacatcttccgcgagatattcctcttggcggccatcggctgcgcggtcggtctcgtgttgggcgtgtggatggaaggcttcgtcgtggtcacggccgaggtggaccagatcatgttcggccgtgccatacacccgaccagcttcctgttggcgtttctgctgaccatgctgttcaccgtgctcgtgatgctggccatgcgcggcaagttgcgccgcatcgacatggtggaaagcctcaagtcgaacgagtaa

SEQ ID NO: 1864 - DNA, 2130 bp, Eggerthella lenta
atggctgacgaaacatcgtatggatgggccggtaagatcctccgcgtcaatctgagcacgggctcgatcacgacgcagccgaccgacccctacaaggagtacatcggcggcatgggcttggccaacaagatcatgtacgacgaagtgcccgccggcaccgaccccttctcccccgagaacaagctcatcttcgccgtaggaccgctgacggcttccggcgtgcccctggccggccgcaccaccatctgctcgctgtccacgttcacgaaggaccacctcgtggtggacgcccactgcggcggcatgatcggcgcgaagatcaagctggccggctgggacgccgtggttctggagggtgcatccgaccaccccgtatacctgaacatcgtcgacgacaaggtggagatcaaggacgccggcttcgtgtggggcatgggcacccgtgagaccaccgagatgctgtgccgcaaggaaggcgtcgaggcgtgcgtggccgccatcggccccgccggcgagaacctgcttccgtacgcgtgcatcatcaacgcgcgcaaccactccgccggcgccggcacgggctcggtgatgggatcgaagaacgtcaaggcgctggtggtgcagggcaacggcagcgtgaacgtgaaggacccgcaagccgtagccgacctgtccgactacatgctgcgcgaggtcatcggctccaacaacaaccacgtggttccgcagacgcagcaggaatgggccgaattctacgacaagggatcccgctggtccgcccgtagcggtctgacctggggtatggccgaagacggacccatcgacacgggcgagccgaagccgggcgagctgaacacggtgggctatcgctgcatgaagtcggtgtacgacctgggcgaggtggccgagaagtacaccatcaagatggacggctgccacggctgccccatccactgctactccgacctgcgcaccgagcgcaccggagaactgggcggcaagaccacgtcgggaaacacctgcgcggccaacttcccgttcaagtacatggagggcatcctcaagacgggcatcgccgaggacagcgagtcgggcattgtatggaacacgctgatcggcaccaccattgacgagctgggactgtggtgcaactacgcgcagctgtggcgcgacctggcgcactgcatcaaggctggcgtgttcgaccgcgtacttcccgaagaggagaaggcgaagtacgactggcagcgcatctacaacgacgaccccaccatcatggtggagctgctgaacgacatcgcccagaacgactccgagatcgcccacatcgcctacggcccgtaccactggaccgagcgctgggatgacaagggctggttcgatcagcagcccagccagctgatcaactaccgcggctggcccgtgcaccacgccatcgagtgcttcggccaggtaggcggcgtgtacaacatgatgttcaaccgcgacgatatgatccactccgccgtgaatttccagggctgcggcctgcctttcgagctgaagcaggaaatcgccgaagaggtgtggggcggcaaggacgccatcgaccagaacaagaactacacgcccatgaacgaacgcaaggcgaacttcgcctggtggagcgtggtcaccgacgtgctgcacgactcgctgacgctgtgcaactggacgtggcccatgaccatgagccccacgaaggcgcgcaactaccgcggcgacctggacctagaggccaagttcttcaaggccgtcaccggcgaggacgtgaccaccgacgacctgtaccaggccggcgccagaatcatgacgctgcagcgcgccaacaccgtgcgcggcatgacgaaggaagacggcaccaggggcgagaacgacatgcgcaacgtccatgatgtgatgtgcgcctggacgttcgatatcgacccggacaagaagcccttcaccgagggcaccatcaagatggaccgcgacgacttccaaaccgccctgggcatggtgtacgacacgttcggctgggatcacgagaagggctgcccgacggccgcctgcctcgaccagtacggcatggccgacgttaaggaagagctggacagcctgggtctgctgccgtag

SEQ ID NO: 1865 - DNA, 1638 bp, Eggerthella lenta
gtgcgagacgcaagcgaacaggctgcatcgccagcctccgatgcgcaagaaaccgcatcgcacaccccggtcgtcgagcgtttgacggtcgaagccgatacgggcaccacggggcccatcgtcgtgccgcacgagagcgacggcaaaaagcgccgcggcatccgtttcggctgggacaacctgacgtacaccacgcgcgtcacggccgcgttcgccttcatcgcggccatgaccgcgcttgtggccatcggcgtgctgtcgttcgtgtgggagcagcacttccagacgtatacgcaggccaacatctataaactcgccgaatccacggccgagcagatcgcggagatctactcggatacgggcacgctcgacaacgtcggcatcgcgacggttgcgggctatgcggcaaagctgaacggcgtgggcgtcaagatcttcgacaaccaaaccggcagcgtcgtgtacgattccacgattccgcccagcgaaaacggaaatgatatgccgggcaaggactacagtcgaggatcgctcgcgcctcctcccggagacagcgaccagctggccatcgcccccatcatcaccgacaacgtcgccgtcggatccgtccacatgtgggtgtacggctccgaggcgctgctcagtcagaccgacgaggaattccgtaacaactcgtaccaggccatggtgttcgcgacggcgctcgccatcgtgctggcatcatgcatcggcttcttgttcgcgcgtacgctggtcagccccatcaaccgcatgaccaccacggcgaaggccatcaaggaaggcgacctgtcggcccgcaccgagctgcacggcgaggacgagatcgcgcacctgggcgagacgttcgacgcgatggccgactccatcgagcgcgaccgcgagctggagcgccgtctgaccaccgacgtggcgcatgagctgcgtacgccgctgatggccatccaatccactgtggaagcgatggtggacggcgtgttcgaggccgacgaggagcgcctggaaaccgtgaactccgaggtgcagcgcctcagccgcctggtagacgccatcttgaagctttcgcgtttggagagccgctctacgcctatgaagaaggaagtggtcaatgtgggcgagctgatcgccggcatcgtggccacgcacgaggcgttcgtagccgattctggcctcacgctgaagtacgagatggagcaaggcgtgcgcgtgctaggcgacgcggacatgattcgccaggcaaccgccaacctcatctcgaacgcggttcgttacacgtccgaagggggcttggttaccgtgcgcgtgaagcgcggcgacatcatggcgtccatcagcgtgcaggacacgggcatcggcctcacgcccgacgaggcgaagatggtgttctcgcgcttctggcgcgccgacgcgggacgcacgcgcgagagcggcggcctgggcatcggcttgtccgtggtgaaggagatcgtcgagcgccacaacggctgggtgcaggtggaaggccgcaagggagagggcgcatgcttcaccattcacatcccgctgtaccagggcgacgagcagcagcgcgggcagaaatcgcaaaaatcgcgtgggaagtcgcgtaaagaccagaaatag

SEQ ID NO: 1866 - DNA, 1749 bp, Eggerthella lenta
atggagcgaattacgctgaaagaaggttgtatgctatccggtgatgtagaaaaactgtatccttccgcgaaagccctcgtgaaggactgcgttgccagccgtatccatgccaaggatgcgagcctgtacgacttctcggaggaagcgcgcgcgtgctccgagcaatacatgggatggacggaccttgcgagcaattcgccgtactccctgcgcgacatccagaatttcgccgactcgatcatcgcccaagggctgaagacggtcgtgctcattggccagggcggctccacgcaggcgcccatgaccatcacgaaatacaacaagcccgattcgtcgaagatcacgttcaaaacgttggactccgactcgcccgtgcgcgtgcgcgccattttggccgaagcgaagcccgagaccacgctgttcgtgatctcgtcgaagagcggcggcaccatcgagccgcgtctggccttgcgcgccgtgcgcgacgccgtggccgaccgcatcagcgaagaggagctggtgcagcacctcgtggccatcaccgaccccggctccatgcttgagcgccaggcgcgcgaagaagggtgggccgcggtgttctccggccagcccaccgtgggcgggcgcttctccgcgctgtccgtgttcggcctgctgccggccgcgctcgtgggcatcgacctggaagagttcatggcgcacgccatcgacgccgagcgccagtgcagcgaggacgccatcgacaacccggccatcggcctggcatcgtttttgtacgacaactacctgcagggacgcaacaagttcacgttcctcacgcagaagcgcggccgcgttctgggtctgtggatcgagcagctggtggccgagagcctgggcaaggacggccagggcatcctgcccaacatcgaggtggactccctgctgctcaagaaagacccgggcgatcgcagcgccatcgtgtacctcacgcgcaacgacctgtgggacgagcgccgcaacttcgagatgagcctgtcctacatcgacccggccatcccgcgcgccaactacaagatcgactccgtcgaagagctggccgagcacttcgtgatgtgggaatacgccatcgcgatgtgcggctacctcatgaagatctgccccttcgaccagcccgacgtggcgtcggcgaaggccgtggtgctcgacatcctcaaggaaggccagcccgagcccgacttcgtgcaggatttcatcgacgaggtgcacatgggcgaggtggaagtgcgcctgtctccgtgcttcaaagattgcaccgatgtccgcagcgcgctgcgtgcgctgctgggcagcattcaaccgggcgatttcttcgcgctcaacgcgttcttgccgttcacgggcgagggtcgacgcgaggcgctggaaaccatccgtcacggcgtggctgagaagcgcggcgtggtatcctgcctggaagtgggtccgcgctacctgcactccaccggccagctgcacaagggcggcccgaactgcggcgtgttcctcatcctgtcggccgacgagctgaaggacatcccgctgaagcaggaggctgaaagcctgggttcgctggccaaggcgcaggcgtcgggcgacctcgttacgctggccgagcgcgggcggcgcgtggtgcacctgcacctgcccgacaactcgggcgttacgctgcgccagctggctgaagtgatttccgacatcctggaaaccatgacggtgccgacggcttag

SEQ ID NO: 1867 - DNA, 1494 bp, Eggerthella lenta
aatatcgcatcatggaagcggcgaaggagaggtttggaaaagaaagccaccttattcgagtacgtgtatcgtcagcttgtcagcgacatcgagcagggtgcgctgcgctatggcgatgcgttgccgtcgctgcatgacttgtgcgatcgatttcgggtgggcatcagaaccatccgcgacgtgcagcgtgctttgaaggccgacgggtacattgtcgtggaggagcgaaagcgcgctgtcgtggcgtaccgtccggccgatgacgcggatgacggtcgcatccgtgcgctgctggcgcgtcgcgaggtggttgccgattgctacagaaccctcgaactggtcatgcccccgttgttccacttagccgctcgatgctgctctgacgaggatcttttcgctttggctcaggatgcgaagcgcgttgatcgctctggcgtatcggaagggtggcgcatatcgcacgcatcgattgttttgcacggcctggtggcaaaggcaggcaacccgttgttcacgtcgtgcttcgcaagcttggagcgcatcggtctggtgccggtggttccgggtttcgaaagcccttttgcctcgcgtgcggtcgacgtcgacgggggtttgatgacgtggatgttctcctctctgcttttgcgcgatgctgatgaggtgcagtatcggttcggttgcatgtatcgcggcgtcgcgcagcgcgtcggggcgtatttcgacgcgctcgagaacgcatatgcccccgccgtggacatcggatcgttcgggtacgcgtggaatgcgaaggccgggttggaattcgtgcacggacaaatagctcgcaatcttgtggaacgcatcgttcggggggaattcgtcgacggccagctgcttccttccatcgccgagctgtcggcgcagtatggagtctccgcttccacggtgcagaaagcgtacggcgcgctcaacgtcataggcgtcgcgcgcaccgtcaacgggttgggcacgcgcgtgcagttgggcaatgcgacgttcagcgagcgctggctggaagatcactcgttcaagagagatgtgggcacgtacgtccatgcggcgcagatgatgtgcgccgtgctgcctgctgcattgagccgcgtgcaaggtcatgcggaggaggtggcctcttctgcggaacgcgccctcgcggtcgaggagggggattgggcggtgtcgaaggctctcatgacgggtttgatcgaatgcacggagccttgcgcattgcagacgattctgcgggagctgaacgatttgctgcgctggggagccttccttacgctgttcgcggcttcgcgagaaagcgcgtccgctctctcgtctctcgaaagcatcgctctcgggcaggcgcgcagagcagacgacgaggggttctcccaatcgatgaccgcgtattaccgccttatgctccagtccgtgctcgcgtttctcgagagggcgggtatgattgacgtcgaccgcacgatcgtgccctag

SEQ ID NO: 1868 - DNA, 3249 bp, Eggerthella lenta
atgccggacatactagatcacgtcgcatatctatcacaggaaatcggacctcgtcctgcggggactgaagaagagcagcaagcggcgttgtacattaccgagcagatgcagaaggatgcgggtctttccgcaatcatagaagatttcagcggagctcccggagccgaagccccgcgcgttatctgctgcgcggctacgctggtagtcactattcttgcactgtttttgccagcggcgggtgtagtgtccatcgtggtcacgctgttagcggctctcctgttcgccgccgaggtgttcaaccgacccgtgctgtcccgcgctttcgcacgaggtgtcagccagaatgtcgtggcgaagtacgagcccggctactcggccgaaacgggcggatcgcgtcggcgcaaggtgatcgtggtatcgcgctacgacagcggcaaggtgaacgccgagctcaacggcccgctgctctcgattcttcccatcctgcaatgggctacgttcggcgccatggtattcctgccagtgctgctgatcgttcgtaacgtggtattcctcaacgccgaaggcgctaccgccatcgtgttgaacgtactggcgtgcatcgcgctggttctggttgctttgcccctggtgttcgcactgctgcacaagctggcttcgtataacgaaggagcgaactgcaacgccgcgggcacggctgtgatgctggaagtcgcacgccgtgtaggccgaggccgtgtgagcgaagccgagctggccgcgaacgccgatgctgcgatccacggagaagatgcggcgcgcaaggcggggttggttcctgaaggcgcgcagctggtgtacgaagccgctaacgtgaagcctcctgcgcctgctccgcagactcccgaagcacgcctggctgcagcgaaagccgccatcgccgcgctgtcaggcaagcccgtttcaggggttacagcgtcggatatcgctcagaacctcgtccagatcaaagaacccccgttgcctgcggctactgacgaaggctatcgagagctgcgcgacgagacgcgcgaagcgttgtccagcattcccgaggataccatgcaggaggctctggcgaacgccgaggctgcagctgccgaggaagctcgtcgcgccgccgaggaggcggccgccattgcggcggcaacggccggcatggcggcatcgtcgtacgatgccgtgagccaggcgggcggaacgagcaacggggttccggactggttcaagaaagctcaggagaaggcgaagaagccccgtaacgcagacaagccggtgcaacgctctcgtttcgcaagcgctcttgatgcagccgacagcgaaagcgccggaagtttcgccgaggcgagcaagccctcggatcatggaacggcggatgtatccgattccggtagcaacgattctcttgatgtgcaggctccccaatggcacatgacggaagcaagcgctgcggacggttcgcagcgtctctctgacgatggcgattacgaggtcccgtccggcgaggagggcttgcaagctccgtcgagcgccgcgcacgaggctgccgtcgaggatgctcaaggcgatccgttctcgacaaccgccatgccgcctattgacgtaagcgggcttcgtccggatgacatgccgcccatcagcgatgttcccatgccctcgttcctggatccgcgcaaggtgcaagaagaagcccgcgctgctcaagccgacatgcagcgctctggcaaccgagtggacgtgacgggcgcccccatcggcgcaagcggacgaatcgacgtcgacatcgaaagctacgaggtttccaccgaggaagccgtccctcaggccgaaacgtctgcccatcggcctatcgtgttgcctgatataggagtttcggctacgaatctgcctcccatatcagagctgccgaagcaacgtgctccgttggcagatgttgagacgtctggtaaatctgccgcgaagagcctgctgagcatgcttccctccatcgacgtgagcggcgattcgacggaaagcgcatcgggggaaaacgcttcgaacgcgagcggcgattcggttgagaagaagcattcgctccgctcgatgctgccatcgctttcgggttcgatcagccgcgccgatgcgtcagagggcaaaacttcgaacgtcagcgcagcgggcgcgttcgttcctgcgggagcaacgggcacgttcgcgcctattggcgatgagctgctggataatgtcgaccctgaagatatctacatcgacgatgctgatgattccgcgtacgagcagaacttcaccgagtcgggagccttcgccggccccgggtacgtggaaatgcccaaatcgcgcgttcatcgtctgttcgaccgtctgcgccgtaagagcaaagaccaagagccttcgcctcaggagtggcttgaagtggatgagtctttcgatgctcgcacggtgggagctgagcgcggcggctgggaaagcttccgagaggatgagggagtcgtcgatcccggtgcgacaacacaattggatccctacaacgcgggctacgagaacggccagtacgatacgatcgaagaagacggattcgacggctcttacgactatgagggcgttgacgaatacgatgacggatacgggcctgacgagcgtcgtccttggcatggcggagctttctcgccccgtcgtatggagaaggccgaactcgacctcaacagcgcttcgaacgaatcgtctgaatccctcgatttcgatgatcccgacgttcctgccgagctcaagcagatataccagttccgcaaccccgacatcaacacggaagtgtggttcgtcgcgctgggttcggagctcgctcaaaacggcggtatgcgcgcattcatcaccgaacatcagcaggagctacgcggctctatcatcatcgatctcgacggcttgggtgctggcgacctctgcatgatcgagcaggagggcatgtaccggacggtgaagacgtcttcgcgtatgaagcgttacatcaagaaggcttcgcaagccaccggtttgaacgtgggcggcgcgcagatcaaatggaaggacagcgctgcttcctacgccatcaaacaagggtaccaggcaatgcatctggtaggcatgaacggagcgaaaccggcgttctttgcgcaaggcgatgatgtgttggaaaacgttgacgagcaaacgcttgaaacgaatgccgactttgttatggagttgttgaagaatatatag

SEQ ID NO: 1869 - DNA, 2004 bp, Eggerthella lenta
gtggaactccttgaattctcgctgctcatgctggccgccgtgctgctctcatccgtcatcgaccagctggttcccaaagtgtcatcgcccctcatccagatagggctgggcctgctcatcgcgctggtcatgggcacgcagatcagcatcgccttcgatcccaacctgttcctagtgctgttcatagccccgcttctgtacgacgaggccaaaaacctcgacaagaaggcgctgtgggagaacaaacgcccggtgctgtcgctggccgtcgggctggtcatcgcctcggccctgatcatcgggttcgccgtcaactggctggttccatccatccccttggccgcggcgttcgccttgggcgccgcgctcggacccaccgacgcggtgtcggtcgcctcgctgtcgaagcaggtgaagatccccgcacgttcgcgcaatatcttggaaagcgaatccatcatcaacgacgcctcgggcatcgtgtcgttccaattcgccatagccgcagccgtcaccggtacattctcgctggtcggcgccacggcgaacttcttcttcgcattcctcggcggcgtactcgtgggcgtagcgttggggctcacgggcaacttcatcgtgcgccgcgtgcgctcgtggggcctcgagaacaccacgttccatgtgctgttcgaggtgttcgtgccgttcatcgtgtacctggtggccaacgcgctgggcaccagcggtatcatcgcagtcgtcgccgccggcattttgaacgtcgtatcgccgcgcgccatcggcccgtccgtctcgcgcatgaatatcgtgtccgccagcgtgtggcgcgtgctgacgttcgccctcaacggcatcgtattcgtgcttctgggtactcagctgccgcgcgccatgcagcgtacctgggaaaacgtcaccatcgataacgacgttctcatcggctacatcctgggcatcaccgtgctcatgctggccgcccgcttcctttgggtgcttatcatggaacgcgtccatcgccagcgcagaggccggatgacgttggacgagcttcgctcgacggccatcatgaccttggccggcccgaagggaaccatcacgcttgccgtggcgttcactattcctttctccatcccgcagcgcgagctgctgctgttcctagcatgcggcgtcatcgtggtcaccatgctgttggccacgtttgccgtgccgctgatcgcgccgaagaaagataccgacgacgaggattgcttcgacgaggagcaagccaatatcgagatactccgatcggtcatcgaagagctggcggcacgtcaaaccggcgagaaccgcgcggccacgcaagcggtcgtccacggctacaacgagcgcatagcccgcctgaagaacagaagcgaactgcccgacgagtccatggcgcccttgcgcctgaaagcgaaccggtgggaacgcgatttcacgctcgacctccttgaacgcgaggaagtggatcagctgatagggtaccggcacatcaagcgcctctcgcgcacggaaaatctgctgcgccatcatgccgaccgcgtgtcgctgcaaatcgcctacctgcgcgtgcgcacgctcgctcacgcaggatggcatcgtatcgtggaggcgctgcccggcgacgatctctccgagcgcgtgcaggccgagcgcgacctgcgcctccgcagcaacgagcacgtcatcgaaaagttgcaggcggagctcgcctctcccacttcggaagagcctaccgagaacctgagcaagctgctactggaataccaaagcctcgtgcaaaccattcacagcgccgcaagcccgtccatcaccgtgctgaccagcactgcgaacaaagccgtggacatccagcgccaaggactgcggcttgagctggaagccattcaggcgcgctacgaggagggggcgctgccccgctcctcgtacaaacggctgcgcgagaacgtgatgctcatgcaaatcgatctggaggacaacgtgtag

SEQ ID NO: 1870 - DNA, 2004 bp, Eggerthella lenta
atgcaaaacatgagcggttcgcaactccgcgaatccttcgctttttcccgacgaaacgccgtgctgttttgcgcggcgctcctggcgctcgcatgcgcgcttgtggcgctggctcccgggcaggctcacgcgaaatcgtacaccatgccgaaggtggatatccaggcccaggtggaaaccgacggcgcgttgcaagtgaccgagcagcgcacgttcgatttcgacggcgatttctccgcggtgtggtgggccttcgacgggcttccgcagaacgcttccctcaagatcaacggcgtgcgtatggcgaacgtcgatgccgatggcacggtggtgggcgattggacgacgttgccgagcgaggcgttcgtgctcggctggcgcgaatcgggcgggcctgggaaagattcctactcgttcgacgcgccgaagaacagcgtgtacgtgttcttcaacgcctccgacgaccgtcgcatcatcgagctcgattatacggtggtcaacggggcgcaggcgtattccgacataggcgaggtgtattggaaatacgtgggctcccaatggaaagaggcttccgacaacgtcaccatgacgttggcgctgcccgtaccgcagggtaccgaggtcgtgccgggagagaacgtgcgcgcatggggtcatggaccgctcgacggcaaggtgaccgtgaacgccgacggaaccgtgacgtatgccgtgccgcatgttgcggcaggtcaattcgccgaagcgcgcgtggcgtttccggtgaagtggttaacgaacctgtcgcccgaaagcgcggcgctgcatcaaggggaaaaccgtttggacacggtgctgaaagaagaaaaggactggagcgaccaggcgaaccgcactcgcgttctttcgttggcgttcgtcatcggctgcggtgttgtctgcgtgctgctgctcgcctgggcgctgcgcgcctacttcaagtacggacgcgaataccagccccggtttaccgacgagtattggcgcgacgtgcctgacccctccatccatccggcggctatcggacgcctgtggcgctgggatcgcgagagccaagacgatttcacggctacgctcatgcatcttgcgcacgtcggcgccatccgcatcgacgcgggcagttacgaggaacccggcgcgttcgggcgcatgaagaccgtggacgactattacatcacaaggttgcctgctgccgacaacgtgaccgatcccatcgatcgtcaggcgttggatttgctgttcggcacgttggccgggggagccgactcgctgtggttcggcactatcaagaagtacggcgaagatcatccgcaggagtttgtcgacgcgatgcagggctggcagggcgcgctttcggcggcgacgaaccgcgaggatttcttcgaggcgaaaggcaagcgataccagggctacctcatcgcgcttgccgtggtggtcgctttgtccggtgtcgccatttggatactcatgtcgaacttcatccctctgatattcatgattcccaccgccatcgcgttgggcgtgatcgggaactacatgccgcgtcgcagtgtgaagggcaacgagctgacggccaagagcaaggcgctgcgcaactggctgaccgacttctcgtctcttgacgagcgtccgcccaccgacgtgaaggtatggggcgagttcatggtgtacgcctacctgttcggcgtggccgaccaggccatcaagcagctgcaaaccaccatgccgcagctgttcgagtacgacggatctatgggcatgacgtacatgccttggtggttctggtacacgggaggccatacggctgccggctcagcgatgccttcggttagcgacatgctgcaaacgtcgatgacgaacacgatgtcaacggctcaggcggcgctttcgggcgctagcgggaacttctccagcggcggtggattcggcggcggcttctcaggcggcggcggaggcggcttcggcggcggaggcggcgcccggtaa

SEQ ID NO: 1871 - DNA, 2838 bp, Eggerthella lenta
ttggagaacatggctgaaaccacgttgacacgtcgaagcttcgtcaaggcgtccgctctggtgggcgcgacggcggcgttcggcgcttcgatggccggctgtatgcaggaggctccgcaggagcaggctccgtccggcggcggcgccgacgagggtctcgtgaggatgaagacgtcctgccacggctgcatccagatgtgcccggctatcgcgtatctgaaggacggcgtcgtcgtaaagctggaaggcgaccccgacgcgccggtaagtcgcggaagcctgtgcatcaagggcctcaaccagctgcacaccatgtacagcccccgccgcgtgctgcatccgcttcggcgtgccggcgagcgcggcgagaacaaatgggaggtcatcagctgggacgaggccgtcgaggaagcggccacgcatatctgcgacgccatcgacaaatacggcccctattccttcttcgccagcgtgggcggcggcggggcctactcgttcatggaggccatgaccctgcccatggcgttcgggtcgcccaccgtgttcgagcccggctgcgcccagtgctatctgccgcgctggagcatgtcgaaactgttctacggcggcaacgaccagtccatcgccgacaacgccgtgcaggagatattccgtcccgaccccgacaacaaggccgaggtcgtggtgctgtggggcgcccagccttccgtcagccagacggcggaatcgggtcgcggaatggccgagctgcgcgccaagggcgtgaagaccatcgtggtcgatcccaacttctcgcccgacgcggtgaaggccgacgtgtggctgccggtgcgcccggccaccgacacgggtctgctcctgtgctggttccgctacatcttcgagaacaagctctacgacgagcagttcacgaagtactggacgaacctgcccttccttatcgaccccgagacgaagctgccggtgaaggcgcaggagctgttccccgacttccagcagaccacgcccgagaacaccccggcctacgtctgctacgacctcaagacgaacgcagtggcgcccttcgagttctccgcgcccgccgacgccgcagtggaccccgagatcttctggacgggcgacttcgaagggaagacgtacaagaccgccggccagatctacaaggaagaagccgatccctggacgctcgagcacaccgccgagaactgctggctcgatgccggcaagatcgaaaaagccatcaagatctacgccgaggcctccgtggccggcatcgccaacggcgtggcgtcggatatgaccgagtccgcctcgcaggtgccgctgggctgcatgggcctggactccatcatgggctacgtcaacaagcccggctgcacgatgacgcagtacggcgccgccggcgcgccgccgacgaagcgcccggtcacgtacaacaacggcttcgacggcatgttctcggacatgtacggcatcggcgcggtcatcggcatgagcgatgccgagaacgaggcgcgcgccaagaagctgggggaggagaacccgcagcagaagctggcgaaccagctgctcgtcgatcgacttggcatgaaggaccacaagggcctgtacgcatggtgccacagccatatccccacggtgcgcgaggccatcgccaccggcgagccgtacaagccgcgcgtgtggttcgacatgtcgggcaacaagctggccatgctgggcaatgcgaagtcgtggtacgacgtgttccccgaggtcgactacatcatcggccagtacccgatgctcacctccttccacatcgaggccgccgacctcgtgttccccgtgcgcgagtggctggaagagcccatggtgaacatgacccagctcaacacccagtggctgcagaacgagtgcgtgcacatcggcgagacggtgtcgcactccatcccagccgcgcaggtggtggcgaaatgcgcggagaagatgggcggcgagctgcccggtctcaagcccggatacctgggcagcgccaccgaggaggaggtcaaggcctccgtcgccgagacgctgcacgcgcccagctgggacgagctggtgaaggacgccgacaagtacgtgccctacgtcacgccggccagcgagtacttccattacgaccaacatgaaaccgtggtggacgatggcctgcctgccggcttcggcaccgagtcccgcaagatcgaggtgtactgccagatcctgctcaagctggcgcgcacgggatatccgttctgctatccggagccgcaggagccctgcgaggactacagccccatctgctcgtacatcgagccggcggagagcccgctatccgacgaggagtaccccttcgtgctcacgtcgggccgcgtgccgtacttccaccatggcaccatgcgccacgccgcgctgtcgcgcgagctgttccccacggccgagatccgcatcaatccggcgagcgccaaggagctgggcatcgagcatatggattgggtgaaggtgaccagccgccgcggcgaggtgcacgcgcgcgcctacctcaccgagggcgtgcatccgaaaaccgtgtggatggagcgcttctggaacccggagtgctacgacgagtcccagacgaacccgacggccggctggcgcgagtgcaacgtgaacgtgctcacgaagaacgacgccccgttcaacgaagtgtacggctcctacacgaaccgcggtttcacggtgaagatcgagaagtcccagaaacctgcgaacgtatgggtggagcccgaggagttcgcgccgttcctgccgactgaggaaatgctgtccgaagctcagacgaaggatgtgttctga

SEQ ID NO: 1872 - DNA, 1485 bp, Eggerthella lenta
atgagcgaatccgcatcgcaccacgcgtccgccacttcgggcattccccaaccccacggaggactgggcatctttcgcctcgtcaccacggtcatcacactcatcgtcggcggcggcgtgttcacgttggcgggcgaccaggctgcaggcggcgccagcggcgcggctatcctcactgcatggagcatctcgggaatcggggtgctgtgcctcgtcatgacgttcttcgcgctctcgcgcatcaagccgcagttgaagggcggcatctacagctatgcgaatgcggggttcggcgactttttgggcttcaacagcgcttggggctactggatcagcgcgcttctgtgcacggtcagcttctcggcgcttctgttcggcgcgctttcgtacttcttccccatcttcggcggcggcacgaacctgccgtcggtcatcggcgccagcctgctcatctggttctacgtgttcctcgtatcgcgcggcatcaaagaggctaccggcgtgaacgccgttatcaccatctcgaagttcgtgcctatcttcgtagccatcacggccatcatctttctgcagaaattcgacctcggcatctttctggcgaacatgtcgcagggcgccgatccgggcctgccgttcttcgaccaggtgagcaacaccatgatgatcaccatctgggtgttcgtgggtatcgagggcgcggtcgcgatctccggtcgcgccaagaaggaacgcgacgtgggcaaggccaccatcatcgcgttcatctgcgtgctcagcatctacctcatggtcagcgtgctcagcatgggcgtcatgccgctgtccgagctggctcagctggagaacccggcgcttgcgggcgtcatggagcacgcggtggggcagtggggcgccatcctcatcaacggcggcgtggtgctgtcgctggtgggcgccatgttgggctacaccgtgctgtccagcgagtcgccttacgaggcggctgagcagggcgtgttcatcaaggccttcgccaagacgaacaagaagggcgcccccatcgtcacgctcgtggtgacgaacgtcatcctcgaggcgttcctcgtggtcatgctgttctcggacagcacgtaccagttcttctacgcgctgtcggccggcatgatcctgctgccgtacctgctgtcggcggcgtacttcgcgaagctcacgttcaccgagcccgacgcgttcaagggcaaggtgggcggcagcctggtgctgtggcgcattttcggcgtgttcggcgtggtgtacagcttcttcctggcgtgggcgtcgggcgcgacggggctcaccctcatgtcgcttctgtacgcgccgggcatcctcatgtacatcaagggcaagaaggagcgcaacgagccgtacctcaagagcacggtggacaaggtggtggtggccatcatcctcatcgccgccgtcacgtcgctcgtgctgctgttcaccggccaagtggtgctgtag

SEQ ID NO: 1873 - DNA, 1875 bp, Eggerthella lenta
atggaatctgtcgacagtgccgccgctcggcgcacgtatctgcgtctgatcgagccggtgaaagggaggatcataggcaacgtcgccatcgcggccttgtcgtcggcgtgcgagttcgtcccctacctcgcaatcgcgcgcgttgcccagctgtccatcacggaaggcgttcccccgtccgacgtgctggcgatgtgggttctggtcgccgtcgcgggcgcggcggcgggaaggatgctgttcagcatggccaccggccgctgccattacgccgacgccgattttcgcgttcacgtgcgcaccgtgctgatagagcacttggggaagattccgctgggatggttcaacgacaacagctcggcgcaggtgaagcaagctgccaccgatgacgttctcaacctgcatcaatcggtcgggcatgcgccggtcgacgtgaccgccgcgctgctctcgcccttgatccccttggtgtacctgttcacggtggacgttcgcttcgcccttcttctggtggcgtacttcgtcgtggtgataggcgttgcgtggccgttcatgatgagggatttcggtcctctcaacaagaggttcaacgaagcgatggtggaggtttcctccgctgcggtggagatggtggagggcatcgccgtcatcaagaccttcggttcccgaagccgcgcgggcgcacggtaccgggcggctaccgaggagctggcgaaagcgtgctatgtgtggacgaagcgcaacggcaacgcgttcagctgggtgtcggccttgttctcgccgggagcaatgctggtggttctgctggctgcaacgctggccttcgtcgcgaacggcgttttgcctttggagcggtgcgtcccttttctggtgttgggcgtgggagttcccgcggggctggtcaacctgtttcgaagcattcgaatgctgcagatgtcgctgcaggccgccgaccatctggcctccgttctcaacgtggctccgttggccgaacccgagcggcctcgcccggcggccgaaggacccgtgtgcatggagttcgagggcgtggcgttcgcgtacggcgagaacctgcctttcgtgctgcaagacgtcgacgtcgcgttggagccgggaacggtgacggccctcgtgggagattcgggcagcggcaagacgacgctcgcccgcttgatccctcgcttctgggatcccgtttcagggtcggtgcgcatgaacggaacggagcttccccagatggcctccggcgaggtgctttcgcgtgttgccgtggtgttccaggacagcatgcttttgcgagcgagcatcgcggacaacatccgtttgggccgtcccggtgccaccgacgagcaggtgcaggccgccgcgcgccaggcccagattcacgatcgcgtaatggagttgccgcaaggctacgacacggtgctgggaagcgaaggctcggacctgtcgggcggcgaggcgcaacgcgtggccatcgcgcgcgctatcgtccaagatgcgcctattctcgtgctcgacgaggcgaccgcccatgcggatcctgagaacgagacggccatccaaaaagcgctgaacgcgttggcgaaaggcaggacgaccgtcgtgatcgcgcatcggctggacaccatcgtgcatgcggaccagatattagtgctggtcgggggcaaggtggtggagcgcggcgtccatgaggaactgctggcggccgacggccattatgcggcgctgtggcgatctcagcaggtggatgcgctggaaaaggcgctacttgtggaaggagccgcgatgcgcggcgcggccgcggggccgcaagaagcggatggcgaagcggagccgaacggtgccgattcgcgcgaaagcgaggaacgatga

SEQ ID NO: 1874 - DNA, 1521 bp, Eggerthella lenta
atgtggcaacggttcacattgtacgacgttcgggtcatcggccattatctcggcgtgctcgttctcttctccagccttgctctgctggtgccgttcgtcacggctcttgcgtgcgctgagtggactcctgcgacgcactatctgctgaccatcggcattgcgcttatcgtcggatcggcgctgcggttcctgcgcatcgatccgggtcggctcaatcgccagcaggcgctcgccgttactgggttcgcgtggatcgtgctcgcgttcgtggcggcggtgccgctgtacctgtcgggccattacctcagctacctcgatgccctgttcgacggcgtgtcgggtctgaccaccacaggcgccagcgtcatcgtcgatctcgatcacctgtcgaacgccgacaacatgtggcgtttcatgatgcacctgttgggcggtttcggtcttatcgtggtggcgttgtcgttcggtttgttcggcaagcgcgctggagccagcctgtacatgtccgagggtcgtagcgaacatgtggtgcccaacgttgtgcagaccacgcagttcatcgcgaagatcggcatgggcatgatctttgtcgccacggtgattctcacggccatgtgcctgttcctcggcatggaaccgctgcgcgcgttcctgcaatcgctgtggttggccatctcgggtttcaccacgggcggctttgcccctatgagccagagcgtcatgtactatcattggttcccgctcgagatcgtgctcatgttgcttatgttgctgggctccatcaacttcgttctgcactccgaaatgtggaaaggacacgtggaggttttcttccgcgatctggaaatccgcacgatggtgctgtggttggccgtgatgacatgcgtgctggcagcctcgctcagcgcaagccccgagttttccagtctgcctgccatgttgcgacgcgggctgttcatggtgatatcggcgttctccaccaccggctttcagaacatcaccaccaacgagctgacaaccgcgctgtcgtcgggcgcgttcttcgtgctggccatcctcatggccgtgggcggcagcggcgggtccacttcgggcggcttgaagttcagccgcatgggcatcatcatgaagtccatcatcgccaccatcaaagaggcgcttgcgcccgattcggcgcgcgtcgtggtgtcgtacaaccatgtgggccggcgcattctttcaccggaagtcgtgaaggaggccatgacggtgttcgtgctgtacgtggccacgtacgcggtgggcacgctggtgggcatcgcgcatggctacgaggcgccgcaggccattttcgaatcggtggccatggccagcaacggcggcgtgtcgtcggggcttgccgctccgggcatgtctccgtcgttggagctcttctacatcgcgcagatgtgggcaggtcgtctggaattcgttaccctgttggccctggtggcggagatcatcgtgtcgctcaatccgaaaaggcgggtgctaaagtcatga

SEQ ID NO: 1875 - DNA, 1680 bp, Eggerthella lenta
ttggacacgaaagaagcgctgaagtcgttcgagctcgacgcgcgactgttctacgacgctatagcgttcagcacggacgactacctgtacatcatcgacatgcaacgcgatatcgcgctcgtctccgacaacatgcgcgacgacttcgacctgccggacagcctcgttcccggcctcatccctctctggagagaactcatcgtcgaacgcgatcggaagcgcttcgacgattcgatcgacagcatgctctcaggggaaaccgactgccacgatctcgaataccaggtgaagaacgccttgggagaaagtatctgggtgatgtgccgcggactcctgaagcgcgacgagaacggccagccgacgatgttcgccggcgtggtcacctgtctggagcgcaagggtaaaatcgactcggtcaccgggctgttcacgcacgacgaatgcatgaacctcatcgatcggctcatcgcctgcgaatcgcagggcggcgtcatgctgttggggctcgatgacttttctcgcatcaacctgctgaacggccacgctttcggaaacaccgtgctcagaatgttcgcccagtccacccaacgcctcatccccgaaggagcgtccatgttccgcctcgatggcgacgtgttcgctatcgtgatggacggcgccggctgcgccgccatggaagagctctaccacgccatccacgtggttgcgaaccgccaacacaccatcgacgacttgagcttcttctgcatggtgtcggccggcatcgcgatgatcggccaagacgcccagagcgcccaggatctgctgcgcaacgcggagaacgcgttggaagagagcaaacagcgcggcaagaacacttccacgttcttttcgtccgcgacgatcgcgacgaaacttcgccgcctggagatcagcgactacatgcagtcttccgtcctcgacgatatgaagaacttcgagctgtactaccagccgctcgtatgcgcggaaaccatggacatcgccggagcggaagcgcttttacgttggagttccgaggagcacggccagctctcgccggtggagttcattcccgtgctggagtcgtacgggctcatcggccaggtgggccgctgggtgctggagcagtcgttcacgcagtgcaagcgctggtcggaaacgcatcccggcttcatcatggacgtgaacatctcctacctgcagctgctcgacgccgacttcgtgccgttcgtggagcagctcgtcgagcgcaccggggtcgacccggcgtccatcgtgctggagatgaccgagagctacttcgtcaccgacatggacgcgctgcgcgccacgttcgaccgtctgcgctccatcggcatccgcatcgccatggacgatttcggcaccggttactcgtcgcttggcctgctggcccagtcgcccgccgacatcgtgaagatcgaccgcctgttcatcaaggacatccaccgggaagcgttcaaccgcgcgttcatagacgcggtcatcgagctgtgccatagcgtgggcatcgaggtgacggtcgaaggggtggaagaacccaccgagctcgacgccgtgcgcgccatcggcgccgacagcatccagggtttcttcgtctcgtgccccattccggcgcatagcttcgaggaacggttcatcacgccgcagacggcctcttag

SEQ ID NO: 1876 - DNA, 2664 bp, Eggerthella lenta
atgaacatgggtaacctgaacaagctagccctgaccgctcaggaagcgctgcaacagacgattgtcatcgcttccgagaacgagtcatcgcaggcagagcccattcacatgttgaaggctctgctggaatcgaaagagaacaacctgtccgctatcatcaagcgcatcggtgccgagccgttccagctgcaggccaacgtggatgccgagatccagcgcatgccgaaggtcagcgggaaccccggcatgatgagcggcgtgcctggcccggccctgatgaacctcatcgacaacgccgtcaagatcgccgagaagctgggcgacagctacgccaccagcgagcatctgctgatcgcgctgtccgaggagaagggcgccgcgggcaagatcctcactacggccggcgtcacgcgcaagagcatcgaggctgcctacgaggagctgcgcggcgacacgcgcgtcaccgaccagcagaacaaagtgcagttcgaggcgctggagcagtacggccagaacctcacgcagaaggcgcgcgaaggcaagctcgacccggtcatcggccgcgccgaggagatccgccgcaccatccaggtgctgtcgcgccgcacgaagaacaaccccgtgctcatcggcgagccgggcaccggcaagacggccatcgtcgagggcctggctcagcgcatcgtggccggcgacgtgccctcttcgctgaaggaccgcgacctcgtggcgctcgacctgggcgcgatggtggccggcgcgaagtatcgcggcgagttcgaggaccgcttgaaggccgtgctgcgcgaggtgaagcagagcgaaggacgcatcatcctgttcatcgacgagctgcacaccatcgtgggcgccggctccacgggcgacagctccatggacgcgggcaacatgctgaagcccgcgctggcccgcggcgagctgcatgccatcggcgccaccacgctggacgagtaccgcaagtacatcgagaaggacgccgcgctcgagcgccgcttccagcccgtgctggtcaccgagcccacggtggaggacaccatcgccatcctgcgcggtttgaaggagaagtacgagatccaccacggcgtgcgcatcaccgacgccgccatcgtggcggcggccgagctgtcgaaccgctacatctccgaccgcttccttcccgacaaggccatcgacctcatggacgaggccgccagccgcctgcgcatcgagatcgactcgatgcccgaggaggtggacgccgccgagcgcaagctcacccagatgcagatcgaggagcaggcgctcatgaaggagagcgaccaggcctcgcaagagcgcctggaagcgctgcgccgcgagatcgccacggctcaggaggacctcgacaagcgcaaggccgagtggcagaacgagaaggacgccatcgagcacgtgcagaacctcaagagcgacctcgagggcgcgcagcttgaagaggagcgcgccacccgcgagggcgacctggtgaaggcctccgagatccgctacgcgcgcattcccgcgctgcagcagcagctgcatgcggccgaggaagagctgaacgtgaagcagcaggacggcgccatcctcaaggaggaggtgtcggacgacgagatcgccgaggtcgtttccacgtggacgggcattcccgtgcagaagatgatgcagggcgagatggccaagctggtcgacctggaggacaagctgcacgagcgcgtggtgggccaggacgaggccgtgtcctcggtggccggcgccatccgccgcaaccgcgccgggttgtccgacccgaaccgtcccatcggctcgtttttgttcctgggacccacgggcgtgggcaagaccgagctggcgaaggcgctggccgagtacctgttcgacagcgagaaggccatggtgcgcatcgacatgtccgagtacatggagaagttctcggtgcagcgcctgatcggcgcgcctccggggtacgtgggttatgacgagggcggccagctgaccgaggccgtgcgccgcaagccttattcggtgatcctgctcgacgagatcgagaaggcgcacccggacgtgttcaacatcctgttgcaggtgctggacgacggccgcctgaccgacggccagggccgcgtggtgtcgttcaagaacgccatcatcatcatgacgtcgaacgtgggatcgcagttcatccgcgagttcgccgagcacggcgacgagaaggctatgaagcaggccatcgacggcgccctgcgcgcgacgttccgccccgagttcatcaaccgcatcgatgacgtggtggtgttcaacgcgctgaacatgacgaacatcgagcctatcgtcgatttgcagctggaagaagtgcgcgaccgtctggccgaccgccgcatcacgctcgacgtgacgccggcggcgatggagcacctgtccatcgacggctacgatcccatcttcggagcgcgtccgttgaagcgcctcatccaaaaggagatcgtcgaccgcatcgcccagaaggtggtggaaggcaagctgcgcgatcgcagccatgtgctgatcagcatcgaccaggacggcaactacgaatgcaccgtggaagagcccctggagctggacgccatgcccctcgacgacctgctgaccgaaggcgataagtaa

SEQ ID NO: 1877 - DNA, 1575 bp, Eggerthella lenta
atgagcatgaaaccgagcaacatcagcataagccgcatcttgatgatatcctacggcatcgtcatcgccctgttcgccctttcgatcgcagtggcgctctacggcgtccacgcgaacgcctccatgaccaaagagttctacaaccggccgtacatggtttcgaaaagcgccgtggcgcttcgcttcacgatcgaggagatgtcgacgtacgtcgagcagctgcttaacgcagaaaacgacgcggcgaaacagaaagcgctggtggccatcgaggatctcactgaacaacgcatgaacgagctgaacgtcgtccggtcgctgttcaaagccgatcccgatcttctagaacgcttctcgaacgcctgcgacgagctgggcgcgcgccgcaacgccgtgatcggtgcagccgaagcgggagacatcaaccgcgccatcgacctgtactcgaacgagtacctcgcgcaaaaggaagtgaccgtcaacctgtccaccgaggtcgtgaacaccgcagagcacgtagcgcaggccttcgtcaaagactcgttcagcgtcgaggtcggaacctcgctggccatcgggcttctagggacggcggccatcgtgctcgtcatcgttatgtggaggcgcatcacgcacagcatcgccgcgcccattcaggagatcgaccgcatagcgaagcggttggccgacggcgatctgacggtgcgctcatcctgcacgtccggcaacgagctgggctcgctcgcttcgtccatgaacgaaacggtagcttcgctgcgcttcgccaccgagcagctcagcgaaacagccgagcaggtggctcgctcgtcatcgcagatgtcggacagctcccaagccgtcgcgcaaggctccgccgagcaagccaccgccatcgaagagcttgccgccaacgttcagagcatcacgcacgtggtgggagagaacaccgaaagcgtcctgaccgtgaattccaacacctccgatgtactgggcgcggtcgaggaaagcagcgactcgatagcccgcaccgtgtgcgccatcgaggagatcaaagacaacgcccagagcatctcgcagctggccaactccatcgaagacatctcgttccagacgaacatcctcgcgctgaacgcctccgtcgaagccgcgcgcgcaggcgatgccggacgcggcttcgccattgtggccgaggagatccgccgcctcgcctcgcaggtgagcgaagcgtcgcgtgcggctgacgaactcgccgggcgcgccatcgaaaacgtcgaggccggaagcgagctgatcggctccgcatcttcgaacatggaggaagccgttacctctatcgaagacatcaagacggcgatgtcctccatcgctcacgcctccgagcagcagctcgaagcggttgcccagatacaggagagcatggacagcctctcccaggtcgtgcaggagaactcggccgcctccgaggaaagcgcggtcatcggagaggagcttgcggatcgcgcgaacgaactcaagcacctgatcggccgcttcaaaatcgatgcagatccgcacgaaagcgaagctggggcatga

SEQ ID NO: 1878 - DNA, 2079 bp, Eggerthella lenta
ctatcttggcgcctcgtgctggcggccgtgcgcgctagcttcgctgagaggcgtcttgccgccgtggatcctgcgcccgtctatcggagcggcttcatgaagaaggtttcatcgcggaagcacgatcgattcggtcgcgtgctcgattccgacccggtctatcttatcgcggcgcttgcgctcatggcgctgctcgtgtcgttctacgcggttctgttggtgaatatgaacgccatcgatacgaaaaccgaggatctcaaggaacatccctacgcggtcaccgttgcggcaggtcgagccgaaacgctgctcatgcaagtgcgaacgctggacaaccgcttagcgttcgcgcgcacgccggagaccgtcgcaagcgttaaaacggagttcgcctccatcgacgaaaacctgcgcacagcgttcagggtggttgaacagcgccatcacggcaatcccgagaaagtaaaggacctggtaagcaactacgaggagttcagcgagttgcaggatcggcttatcgccctcagcttgagcgacgcagacgacgaggcggttgccgcttttctggcgagtgaaatcgacccgcgcatcgatcggatgctggaagacaaccaggccatcatatccgccgccgcccgttctttcgaccagttgtacaaggcggtcggcaaaacccgccaggataccatgttcacggcgtcggtgcttatgacggccgtgatggtggcgctggtgctgttcctcgcggtgatcaagcgcaagaaccggcaagagcgcgagctgcaggaaagcctgcggtgcgcgatggagaaggcgcaggatgccagcgaagcgaagtcgcgcttcctgtcgaacgtgtcgcacgacatccggacgcctctcacggccatcatgggactcgtcgatatagccgtcgagcatatcgacgagcgcgatcgcgtgaaggaatgcttcgacaaagtgcagctgtcgtcgcatcacctgctcaatctcgtgaacgacgtgctggatatgagcaaaatcgaaagcggtcaaatcaacctgtgctgcaagccgttcgacctgcatgtcgtcgtggaaacgctcgggtccatcgtgcgtccgcaagccgattcgaagcatctgacgttctcggtgttgcgcgtcgacgtcgaagaggggcttgtgctgggtgacgagatgcacgtgaaccaggtgctcatcaacctgcttggcaacgccgtcaagtacaccgagccgagcgggacggtaagccttgccgtcgaggagctgaggggcgacgagcgcgtggaatatgccgcccagcacggtctttcgcttgagccgaccagccatgacggcttcgatatgtgtattcgcctgatccgcttcatcgtggaagatgacggcataggcatgtcgaaagagttcatgtcgcgtttgttcgacccgttcgagcgcgaggaggtgcctacgcgcttatcggtggaggggactggtctgggcttgtccatcgttaagaacctcgccgacctcatgggcggtaccgtacaggtgcaaagcgagcgagggcgcggatcgcgtttcacgttggtgctgccgttcgaagcttgcgaaggggatgcgtgcaaactgcagttggaggagtccatcgaggccgagcgctcggatgctgcggtttcggcggtgtcatgctcctggcagcatgtgcacgtgctgcttgcggaagacaacgagatcatcggcgagatagcggaggagatcatcgcttcgacgggcgccacggtcgagcgcgcctggaacggcctggatgtgctcgatctgcttgaaggcgcgcccgaagggcgcttcgacctcgtgttcatggatatccagatgcccggcatggacggcctcgaggcggcgcgactcgttgtcgaacgctaccgggaagcaggtcgcgcacggccgcctatcatcgccaccacggcgaacgcctacgaggaggatcgccgccgcgcgctcgacgccgggatggacggattcgccgtgaagcccatcgggaaaagcgaggtgtgccacctgtttgcgacgttcgtcgacgctaagatcgacgaatag

SEQ ID NO: 1879 - DNA, 2799 bp, Eggerthella lenta
atggcagacaacaacgattctttcgacgagttcttgaatcgcgccgaagaggattacgacgcgggcgacatcgaagcggccgaggccggcgacgaagacgacgtgctgaacgacgtcgagggcggtgaggacgagtcgcgccccggcgcgttcgtgtccgaggagaacaaggcgcgctcgctgatcgacatgtcgtcgatcgcgaacccgcacggctccatcgtcgaaggcgccaacggcggcgagggcaccatcgtgcgctccgcctacctcggcaaggagatgcagacgtcgttcctggaatacgccatgagcgtcatcgtctcgcgcgccctgccggacgtgcgcgacggcttgaagccggttcaccgccgcatcctgtacgccatgaacgagtccggctacacgccgaaccgcccgcacatgaaatcggcccgtacggtcggcgacgtcatcggcaagtaccacccgcacggcgactacgccgtgtacgacacgatggtgcgcttggcccagccgttctcgatgcgcgtgccgctggtggacggccacggcaacttcggctccatcgacggcgacggcgcggcggccatgcgttacaccgagtcccgtctggacaaggtggccatggagctgctgcgcgacctggacaaggaaacggtcgacttccagcccaactacgacgagagcctcgaagagcccacggttcttcccgcgcgcttccccaacctgctggtgaacggctcgcagggcatcgccgtgggcatggccacgaacatcccgccgcacaacctgggcgagaccatcgacgccacgtgcctcatgctggacaaccccgacgtcaccaccgaagagctgatgaaggcgctgcccggcccggacttccccactggcggcataatcatgggcaagaagggcatccgcgacgcgtacgagacgggccgcggctcgctgaccgtgcgcgcgaagtgcaaggtggaagagggcaagaacggccgcagctccatcgtggtcaccgagatcccctaccaggtgaaccgccagcgcctgctggaaaagctgggcgagctggtgcgcgagaagaagctgcccgagatcagcaacatccacgacggcgccgaccgccacggcatcgacatcatcatcgacctcaagaaggacgccatcccgcaggtggtgctgaacaagctgtacaagcacacgcagctgcaggtgggcttcggcgtgatcatgctgtcgctggtggacggcgcgccgcgcgtgctttcgctgaaggagatgctgcactactacatcgcgcaccaggaagaggtcatcgtccgccgtacgcgctacgagctggcgaaggccgaggagcgcgcgcacatcctcgaaggcttgatcatcgcgctggacaacatcgacgaggtcatccacatcatccgctcgtcgcagaccgacaaggaagcggccgagcgcatgaccgagcgcttcggcctgaccgacaagcagaccgccgccatcctcgaaatgcgcctgcgccgcctgaccggcttggagcatcagaagatcgaggacgagttgaaggagctgctggagaagatcgcgtacttcaagcgcgtcctgtccgacgaccagctggtgcacgacatcatcaaagaggagctgtccgaggtcaagaagaagttcggcagcccccgccgcacgctcttgtccgaggcggccaaggatctcgatgtcgaggatctcatcgccgaggagagcatggtcgtcacgatgacgaaggccggctacgtgaagcgcctgcccgtggccacctaccgccagcagaagcgcggcggcaagggcatgtcgggcgtgaacctcaaggacaacgactacgtcgagcacctgttcgtggcgtcgacgcactcctacatgctgttcttctccacgaagggcaaggtgtaccgcctgaaggtgtacgagctgcccgaggcgtcgcgccatgcgcgcggcacggccatcgtgaacctgctgccgcttgagaagggcgagaccatctcggccgtcatcgcgacgaaggacttcccgtccgacgagtacctcatgttcgccaccgagcacggcatggtgaagaagacgtcgatggacctgtacgaccgcacgcgccgcgacggcctgatcgccatcagcctgaaggacaacgaccgcctcatttcggtgaagcgcgtggctccgggcgagaaggtgctcatggtgtccagcgcaggcaaggccatcatgtgggacgagggcgaagtacgtgccatgggccgcgacaccatgggcgtgcgcggcatgaacgtgccgcccatcgccaaggtgctgggcatggagatcgcgcagcccgataccgacctgttcgtcatcaccgagaagggctacggcaagcgcacccccatcgccgagtaccccgagcaccatcgcggcggccagggcgtgttcaccatcacgatgaccgagaagaagggcctgctggccgtcatgaagatcgtcgccgaagacgacgagatcatgattatgtccgaggaaggcgtgtgcgtgcgcaccccggtgtcgggcatctccgagctcggccgttccacgcagggcgtgtgcgtgatgaagacggccgacaaggaccgcgtgaccgcagtggccatctccagccgaggcaagaagaagaaagcctccggcgcgcaggtggaaggcgaggagctggacgagaacgccatcgatgagcttgaagacggcgccgaaggcaccgccgagatcgagagcgtcgaagaagcagagaacgcggaaggcgacgaagagtag

SEQ ID NO: 1880 - DNA, 3036 bp, Eggerthella lenta
atgatagatgataggctggacggtatggataaacaaaatatgctctcgcaggataccctgcaaagtttcataagcgatggcacttcccaggccgtccgcgaccggtatgcgtcgcttcccgaaatcgcagcgacgatggatttcggcgatctcgaccataacgtcgtggttctggacaccgagaccaccggcttctctttcaaccatgatgagctgacgcagatcgctgcagctcgcatggaacaaggcgaaatagtcgaatggttcatcacgttcgtgaacccgggaaagcccattccggaagatgtcgcgcacctgaccgatatccacgatagcgatgtggctgatgctccgcttcccgccgacgcactggccaagcttgtggaattcattggcgatgcgaaggtggtcgcgcataacgcagagttcgatcgtacgttcaccacgcgtcatcccagcggttatcccctgttggagaatacctggatcgattcgctcgatcttgcgcgaatcgcgcttccccgcatgaaatcgcatcgcttgctcgatcttgtacgggctttcggcgcgcctttgtcgacgcaccgcgccgatgccgacgtagaggcgacctgcgccatcttccgcatcctgctggcgggcgttgcgacgatgccgccggcgctcgtgtgcgagatcgcgcatatggcgactcctgacgagtggtcgacgaggatggtattcgagcagttcgcccgaaagtacgaggtggaagcgaaccaagatgtttcacgtggaacaccaagtttgagattctctttgcgcgcccttcgtcgtgaccgcttgggcaagctggagcgcgcggcaaagctggacgccgacgatatcgcggccgatccgcaacgctcgcttacgttcccttcagatgcggatatcgttcaagccttttcggaaaccgggctcgtggggtcgttgtacgaagagttcgagcctcgcatagagcaggtcgctatggcagaggcagtgagaaaggcattttcttcttcggagaacctgttggtcgaagcaggaacgggcgttggaaagtccatggcgtacctggttcccgccgcgttgacggcgcgggccaacaacatagccgttggcgttgcaacgaagactaataccctgctcgatcagttggtttaccatgagctgcctgcattggaaaaagcgcttcggttggccgaccctgacaggccgtctctgacgtatgctccgctcaagggtttctcgcactatccttgtttgcgtaagatcggccatatcgtcgaggaaggagcgcagactaagctgttcggcaacaaagagcagacccaggctccctcccttgccgccttgctgtcgtttatcgagcagactgaatacgatgacatggacagcttgaagatcgactatcgcgtgttgcctcgtcgtcttatcaccacgacggcgaacgattgtctacggcgtaagtgtccttatttcggtacttcatgctttgtgcacggttcgcgccgccgcgccgaggcggccgatatcgtggtaaccaaccatagtttgctgttctgcgatctcgtagcagatggtggattgctgccgccgatccgctattgggtggtggatgaggcccatggagccgaagccgaagctcgtcgggctttctcgttgtcgctttcggccgaggacataacgcgcctggccaaccgtgtcggtgccgatgaggcttcccgtaacgtgttcgtgcgtgccgagcgccgtgtggtggtgcccggcatggaagagggttcttcgctgttctacgcccttaccggcaaggcgcgctctgcgggcaaggcctacgctgatgctgcgcgggaattttccgttcacctcaaggaccttctgttcttcgatcagaacaaaaagggaaaaggctacgagatcgtcgagctgtggatcaattcagatgtgcgttccagcgcaacgtttgcccaggtagcaagctatggtcgagcgatgaccgaagcagcggagaagctggtgcgcgtgtgtcaggagctcgtgggatatctggaagagctcgaaggcgcggcagagatccagcgcgagatagcatcgaccgcgatggagctcaaagaccagatgaacgccgccgacatcatcttggacagggctccggaaacgtatgcctatgcggccactttgagtcgcaagaaagatcgcgtcgcagaaaagctggaagcgctgctgatcaacgtgggcgaagcgatgaacgagacgttgttcgagcgcacgcactcgacggtgttcgcgtctgccacgttggcggtggacaataaattcgacgcattcgaaagtgccctgggattgaacgcttcggagcattcgacctgtcagatgtgcaagctggattcaagctatgatttcgacgctcatatgacagtgtacgtggccagcgatatgccggaaccgaacgaagccgcgtatcttgccgcgctgcagcgcctgctggtggacgttcaccgtgcgcagaacggctcgatgctgaccttgttcacgaaccgtcgcgagatggagcgttgctttgacgaggtgcaaccccaactcaaagtcgacgacctgcgcgtcgtgtgtcaaaaatggggtgtgtcggtaaaaggtttgcgcgatgattttctggcggacgagcatctttcgctcttcgctctcaaaagcttttgggagggattcgatgctccgggcgctacgctcaaaggggtcgtcattcccaagctgcccttcgcgaagccgaccgatcctttgtcgtgcgaacgggcggctcgcgacgatcaggcgtggaggcgctacgtgctacccgccgccgttcttgagacgaaacaggctgctggtcgacttatcaggaaggccgatgatacgggcgtgcttattctcgccgatcgtcgcttgttgacgaaaagctacggcaaagcgttccttaattcccttccgagcaggaccatcaaggtgatgacggcggctgagattgtagccgatctcgagcgctccaacaacgggtaa

SEQ ID NO: 1881 - DNA, 2784 bp, Eggerthella lenta
gtgggaaagagagcggcgcgttgcgtctgctcggcgatggccgcattgctgatggcaacaaccgtcttcgtcgttcccgcggcggccgatgtcggcggttcgcgggatgcatccgaggacgttcgagtggtgcgcgtggcgttccccgaggtcgaaggcatcagcgagaccgatgccgacggcgtgcgctccggcatcctctacgattggctcgcggaggtttccaagtacaccggatggacctatgagtttgtggacggcgatgtccaaagtctcatgaaacggacgtctgcgggagagatcgacctcatgggcggcatgtactatcgggagcagctcgtcgattcgttccagtattcgaacttcgccatcggtgcgaaccacgccctgctcatcagcctcgaagagaacgacgatgtcgtcgtcttcgactctcgcacgctcaacggcaagaccatcggcgtgttcgagaacgctaccgagaagattcgccgtctcgaaaactacctcgatttcaacgatatccactgcatcgtcctgccgctcgactacgatgcctactcgaaatgcctggacgacggcaccgccgacgtggtgctgggcggtgacgtggacgtcaccgaaggccgcagggtcgccgccgagttcgacggcgaaccgtactacatagccatgccgttcggaagcgatctgaaggacgatctggatgcagcgatgacgtcgatctacacggcgaatgccgagttcgcgaacgagctcgatgcaaagcacctgccgtcccgccgccaatgcgccatcaagttctccgaagccgaccgtgcgttcatcgacaacgcaggcgagatcagcgtggccgtcatgcagggccgctacccgctgtactacgagcgcgacggactgtaccagggcatcgagaaggatgtgctcgacctggtcaccgagcgcacggggctcgcgtttcgcctcgtgcatgccagtacgtaccaagatgccgtcgacctggttaaatcgggggaagtggacatgatgggcggcttcttggacgacggctacgcggcggacggccaacagctcgccatcaccgagagcttcgcgtcgctcaacgaggtggtgttccgcaacaagctggcttcctccggggaaacggtcttcgcccagatcgaagggcgtgatggcaccgacggcgtggaggcttccgaggtcgtgcactaccgtacctacgaagactgcctcgaagcggtgaactccggacgcgccgacgccaccagcatgcccgtcgcgttcgcggaaggcctgttcatcgaccactcgttcagcaacatcacgccggcaacctccgagcatcatgaggcgggcctttcgttcgccctcgccaagcccgtggacacggagctgtactcgatcatgagcaaggcggtgaacagcttctcgcaggacgagctggacaccatcgcgtcgcacaatagcatgccctcgttcggcaagcagcgcaccattcaagcgctcgtctccgagaaccccttgctcgtcgtggcgttgagcctcgtgctgtgcctgttcgtgggcgctatagtcatcgtggtgtcggtggcgaaggtgcgcaaccgcatgatggagatgaagctggagaaggtggaggagatgggccgagcgaagaccgacttcctctcgcgcatgtcccatgagatccgaacgccgatgaacgccatcatcgggctttcgagcgtggcgtcgctgtcgggggaagccacgccgtccattcgctcgagtctcgagaagatcaacatgtcggcccagttcctgctgtcgctcgtgaacgacatcctcgatatgtcgaagatcgagaacgacaagatgcgcatagagacggcgccgctccgcctgcgctcgttggccgagcgtctgcagagcatgttctttctccaggccgaggacaagggagtcctgttcgagacccgctgcgatgccgacgacgtcgtggtgggcgacgacgtgcggctgcagcaggtgctggcgaacctcttgtccaacgcgctcaagttcaccgatccgggggacgccatccggctgagcgtggtcgtgctcatgcgcgacgagggaagcgcgcgcgtgcgcttcagcgtggaagataccggcgcgggcatccgcgaggaggatctcgagcgcattttcgtgtcgttcgagcaggcgtccgagaatcgccgcaacgcgcaggggacgggtctcggcctggctatcagcagcaacctcgtacgactcatgggcggaaggctggacgtgcagagtcgcgtcggcgagggttcggagttcttcttcgtgctggagctgccgacggccgacgaggaggctttgggggacgaggagacccctgcggaaacggccgaccggtcgcttgcgggctcgcgcgtgctgcttgccgaagacaacgatctgaacgccgagattgccgtggcgctgctcgacatgcagggcgtcgaggcgcggcgtgcggcgaacgggcgcgaagccgtggacatgttcgaagcttcggagccgggagcgttcgatttcgtgttgatggacgtgaagatgccgttgctcgacggcctcgaggcggcgatcgagatccgcgcgctcgatcgggaagacgctcgcacggtgcccatcatcgcgctcacggccaacacgttccaggaggaccgcgaggacgcggccgctgccgggatggacggcttcatccccaagcccttcgatgcccagcagctctacgagacgctgcgcagctacctgccgcgcaaggggtag

SEQ ID NO: 1882 - DNA, 3345 bp, Eggerthella lenta
atgcaacgcttcgctcgctcaaaggccgcgcgttgggccgcgttttggctgaccgcgcttctggcagcagccttcgcaggtgcgctcgcgcccgcgtcggcccatgcgcaggacgcggcgcactcgccctgcatcgccaccgtcgagcaacgcgccgcctatgccgcagacggcacgctggacgaacgagaagccttccaggaaagcctcggcaacgacgagccctcccccggcctcgtccaacaggctctcgcgcgcgagcaggcgcaaaacggcatcgccccgaacgcggttcccggcgacgacggcggcatggccgctatcggcaacgcacacgtggtggcgctgcgcgtgtcgttccccgaccgccccttcgcggaaggagatacgctggaagcgcttcaggcgctcataggcccgcgcgccgtcggcgaggccgcgctgccgagcgccggcggctttccctacgagaacctgcacgactactacctccgcgcgtcgtacggcgcgcttaccgtcaccggcgaagcgttcgactacgcggcccagcacgagcgcgatttctacacggcgaacatcgggcaactgtacaaggaggcgctcgaccacctcgaggcatccggcatcgatctcgcgcgattcgacgcgaacggcgacgggcgcatcgatgccgtctacctgcacttcgccggcggcgacaccggctggggcagcgtctggtggagcaacgagcaggtgctcgacgtccccgacgccgtgtacgctgacggcacagtgcgcctatggaacgccgtggcgctgtcgaatccgtgcgaccaaccgtgggccgcgcagaccatcatccacgaaacgggtcacgtgctgggcctgcccgactactaccagtacgccagccagcaaggaggctccgccgaccgcacgggaatcctcaccttcgacatcatgatgcagaaccagggcgatcacaatggattctcgaaatggatgctgggctggctgcccgacagcaagatcacccgcatcttcgcgaacgagacgggcatcgacgtcaaacgcgacggcaaggtggtgcaacacgtggacgcaaccgccgacggcagctcgtccgtagaagcggctttagaagcgttcgcttcgaacgacatcgatgaaaccggcggtatcgtcgtggtggcgaaccaagacgcaagcatgttctcgtcctactacctgctgcagtacgaccgcttcgccggcaaccaaagcgttcgctacgagcaagatggccaacccgccgagcttccgtcgggatttcgcctcttcagagttcaggccgacctaggatcgggcggaccgtatttcgttcattcgaacacgtacggaaccgtgcacaaccagctgatcgagctggtcgaccctgatatgaacgagccgcacgcggaaagcaccgacctcgtcccagccgcaatcggctcgagagaatacggctgcatgctgtacgcaggcgacgaggtgtctccccgaggttacccttcaaccaactttttcgaaaacgccaacgtcggattcaccggcctgaccatcgccgtcaccgaaagccgtgcggatggcggcacgctgaacatctcgtactcgaacgccggcaagccggaaccgcccgacgatttcacgcttacgcccctgttcgacagcgtctcgaacacggggacgctgtcgttcgaagcgtccacgaagcctgccctcgccacgccgctgcccgcggcaacgcagctcatcgtggacggccagccccacgccctgctgaacatcgagacggacggcaccacggtcagccttccgtactttctcgatgccggcgatatcgggccttcgtcaacgtgcgagatcgtgttccctgccggcatgttcgtcttggctcaaacaggcggcacgactgcatattctcccgaagtgcgcctcgagctgaaagcaagcccgctgctcacccccgtcgactgcgcgggcggctacctgggcaccgagtacaccgaagattccacggtgctcagcaacgtgttcgcctgccccgacggaagcaaacggttcttccagatagccgacggccagctcaagctgcacgccatcgaccccgccgatgtcgcacgcgtatcctcgcgcacggtcgagggcgttcccgttcccgccgtcttggactaccgtccttcgcttcgcgtcgtgccgctatcgaacgagaccgcgttcgtgctcatgcctgcagcgggaggcgaaagcgcgggatactggatcgatctccagcgcggaaccgttatcgcgtcctatcccttcgaccaagccgcttccctctcgcttgcaggcagcgggtccaccgtattagcggcgtctttctatccaggcggcggccgaacgatcgccgcgctcaccccgcttgaagacggaaccgtggaagcgcgctacggatggacccaggccgaaaccgtggttcccgtcgacgccgacgcgttcgccttcgggttcatggatgacgcaggcgctttgacggaggaagcgcgcatcctgcccgccgacgccatcgtcgcggcgctgcgcgatggcgcaacccttctcgagcatgcctccgacaatggcgagctgtgcacgcccgagcgcgccgcggccacgctgcctctgcgcgccagccgcatgctgctggccgtcgagcgcgcgaaggacggcttctacgcgctgctttcttcggactacttggatcccgcgaagctgacgaacctgctgatcgagttcgacagcacgggagcggaacgggcacgatctcctatcgaggtggacggatccgacgtatacatgcaacttcgggtcgctcgccacggcaccgtggcgctgtcgcggcgcatcgacatgacgaaaccgcccatctcccgcagcgacgttctgttctgcgatgcgaacctgcaaccgctctccgtgcttactacagcatccaccggcttgggcgcatggctcgacgacggacgctggctcgacgtgggaatgagcgttgcggcggcaaacgggccgaaggggtcgcccgtcgcaacggaatacggcggcgcaaccgaaggcggcgaggtcgacgaatccaagcgcgcccgatacgtggtaacgacgcaacttgacaaaactcctgcaaacccaggcgatgaccccgccgatcccggcattcaaccgcaaccgctcccgcaaccagccgacgaccagcccgacagcccaagcaagctcgcgcctaccggcgaccacgcgaatgcgctcgagcttgccgccctggcaacggcagcgctggccaccgcgctcttcgcactcatgaggcaaaatgaggcaaaggaatggggttga

SEQ ID NO: 1883 - DNA, 2061 bp, Eggerthella lenta
atgaaaggcttcgagaagcttttgtctccgattgagatagcgccgaatttcgtgttgaagaaccggatgatcaaggctcctcagtcgtcgtggcgctggaacgaggactgcaccgccgacggcagcgatgccatcgccatgtacgagaacatggcggaagggggagttgcggctatcgatgtcgcggccatactgtgggaacctgcgggaggcatctacctgggcgcttacgacgacaggttcattcccggcatgatcgagctcaacgaggccgttcacaagcacgggtgcctcaccatcggtcagttgcatcatatcggtccttcggccggcccgacccctgacgggcctcccccgatctcgtcctctacgttgtccgaggacgagatgccggttcccaagccgtggtgccaagcccctcgcggcctgacggtcgaggagatccacgagaagcagcgcttgcagatcgaggctgccgtgcggctgcagaagggcgggttcgatgccgtcgaggtgcacgtggctcacgggtactttctcgacagcttcgtcagcccgctttggaacaagcgcgatgacgaatacggttgccagaacgtcgagaaccgcacgcgcatcgtgcgcgagatcatcgaaggcatccgcgaggcgtgcggccccgacttcgtcatcggctgccgtctgaacgggcgcgaattccatcccacgaagcagggtatcacggccgagcaagctgccgagaacgcccgagcgttcgtggaggccggcgcccagtacatcagcatcgccggatacgggtacggtcccacgccgtttcgctactgccccgactacttcccgtacccggaacccgatccgttcatggagcccttcatggacgagtaccgcggggtgggtctgtggacggccgttgctcggcggatcaaggatgctgtggacgtgccggtcatcacggcgggccgcatggacgagaacttggcagagcgcgtgctcgaagccggcgatgccgacgtcatcgcgctcggccgcacgctgtgggccgatccgtggttcgcgcgcaaggtggacgaggggcgtatcgacgagatcatgcgttgcacgcgttgcgcgagctgcgaagatccggtcacgcaaccgcgcatctgccgcgtgaatcccaccttgggtcaagagcgccaactagccgccaagccggtggcgaagaagaagcgcgtgatggtggtgggcggcggtccggcgggcatggaatgcgcgtgcacgctctccgaacgagggcacgaggtgaccttgtacgagaaggcgggcgctttgggcggacgcatcaagctggcggccatgatcaagagcggcggatgcgaagaggtcatgcatatcttcaaccacttgaccgccatgatcgagaagtctgacgtcgaggtgaggctgaaaaccgaagttgacgagcagctcatccgccaagaagctcctgatgcggtggtcgtggccgcttcgtcgccgtatcgcatccccgatattccgggcatacatcgcaagaacgtgttcaccatcccgatgatgtcgaagcttgcgcaggtaccgctcaagatgttcggtccggacaagcttgcttcgatgagcgagaagttcttccccgtaggcaagaggatcgtgatttggggtgcaggcgccgagggcgctcaatgcgccgagttcatgcgcaagcgcggcaaggacatcgtgctggtcgccgaagatggggatgtgggcggtttgattccgctcaagtacaaagaacgtatcgagccgtggttcaatcgcgcaggggttcgtgttgtacgcgatgccacggtggctgaattcggcaagcaaggggcgctgctgaggttctcgcaggggggagaagagctggtgccgtgcgattccatgatggtcatgctgcctgagcagcgcgacccggcgtttttcgacatggccgcgtcgctcgtcgacgaggtgtacgagataggctcgacgctcggcggcgagaacgcgttcctcaagcatgcgttcgccgacggacgccgcgtgggctgtcttctgtaa

SEQ ID NO: 1884 - DNA, 2775 bp, Eggerthella lenta
gtgacgcgccgcaatgtagaactcgtcctgctgctggtggcggcgcccgtggtggcgctgctgttcgccatgatcgccatcaaccaggggcaatcgctcgacatgaccaccctcggcgtgccggcggccatcttcgtggccttcgtcatcgcgcacctcgccgtgcgcaagttcgccgccaacgccgacccggccctgctgcccctctcgttcgcgctgtccggaatcggcatcgcgttcgtcaccagcctggcgcccaacctggccgtcggccaggtgatgtggttgttcgtgggcgtagcgtgcatggtgctggtgctggtgttcgtgcgcaacctcgacaaggtggcgaactacaagtacacgctcatgatcgtgggcttcctgctgctgctgtcgccgctggttccgggcctcggccaggagatttacggcagccgcatctggctgcatatcggcagctactccttccaaccgggcgagatcgccaagatcgtgatcgtgctgttcctggcgggctacctcgcgcagaaccgcgagatgctgtcggtgttcacctggcgcgtgggcccgttcaggcttcccgacatccgaacgttgctgccgctgctgctgatgtggggcatcgcgctggtcatcgtcgtgttcgagaaggatctgggcagcgcgctcgtgttcttcttcgtgttcctggtcatgctgtacgtggctacgggaaagaagttctacctggtcatcggtttgggtctcatcgccatcggcggcatcggcgcgttcatggccttcggccacgtgcaggtgcgcgtgaacacctggctcgaccccttcgccgatgcgcagaacacgggctaccagctgacgcaggccatctactccatcgccgacggcgacttgttcggcgtcggcatcgggcgcggcctggccgaacagatccccgtcgttgagagcgacttcatcttcgcggccatcgcagaagagatcggccttctgggcgcggccggcgtgctgctgctgttcctgtgcttcgccgtgcgcggcttcgtgacggcggcgcgcgcgaagagcgacgtcagctcgtttgtggccgtgggtctcacgtccatgatcgtgctgcaggcgttcatcatcgtaggcggcgtgaccaggctcatcccgctgacgggtcttaccctgcccttcatcagccagggcggctcgtcgcttttggccagcttcatcatcgtaggcttcctgctgcgctgcggcgacgagggcacgggcgtgggtcaggagatggccagcgccaccacctcgctgcacgccaacagcgtactgggccgcgtgtcgctgggcaagcgcctgaaccacagcatgctcttgtgctccgccctgttcgcgctgctggtagcgaacctcacgctcatcatggtggtgcaggccgactattaccagaacatgccgggaaacaaccatacgcttgcgaaagaagcgcgctcggagcgcggcaccatcgccacgtacgacggcgtggtgttggcgcgcagcgtgaaggaggaagacggcacctacgagcgagagtacccggcgggcgacttggccagccacgtggtaggctactcgtcgcctcagttcggcaactccggcatcgagaaggcgtacaacgacacgctgaaaggcgaggagaacttcgcatcgtggaccgacgtgctgaactcgttcgccggcctcggcaccgcgggaaacgacgtgacgctcaccctcaactcgaagatccagcaagccgcacaggatgcgcttgccggacgcaagggcgcgtgcgtggtgatggatcccgacacgggcgccatcctggccatggcctcggctcccacgtacaacgcggccgacttcgcggcggtcatcgagcaggcgaacgcgaaccctgacgacagcaccctcgtcgatcgcgcggcaggatcgctgtacgcaccgggctccacgttcaagatcgtcacgctggccaccgcgctcgaggacgacgtggccgacgaggacacggtgttctcctcgcccggcaccatggagatcggcaacgcaaccgtctctaacttcaacaaagcgaactacggcagcctcaccttggcccaagcaaccgagctttcgtcgaacacggtgttcggccagctaggcgtcgagatgggcgctgacaagctggtcgccggagccgagagcttcggcttcaacaaggagatcgacttcccgctgtacacgcccgaatcgctcatgccctcggccgaggacctgcaaaagagtccctgggagctggcatgggcagccgccggcgagccggtgggagacaccacgcgccccggccgcgagagcccggccggcccccaggccaccgtgctcgagatggccatggtgggcacagccatcgccaacgacggcgtcatcatgcagccctacctcgtcgacagcgtgaacaacgccaacggcgaacgcagcttctcggcctctccgacgaaactgatgcaagccgtcagcaagaccacggccggacgcgtgcgcgacgtgctgctgggcgtcgtgcagaacggcaccggcaccgcggccgccatccccggcatcgacgtagccggcaaaaccggcaccgccgagaaggagaacggcaacgacagctggttcgtgggcatggcgccggccgaggatccgcgcgtcgtggtggccatcgtcatcgaggacggcgaagagggagtgggaaccgctaaagcgcagaatgtattgaaaacagctttggaagttcagggacttttgtag

SEQ ID NO: 1885 - DNA, 1665 bp, Eggerthella lenta
atgaagcgagcgccgaatgcgcgctggacgcgcatcttcgggttggcgggtttgctgaccctgcttcgccgcgtgcggcgccgggctgatgcgaaggagctggccatcgagagccgcgagcagctgttcagcatgctggtgcgcaatgccgacgatatctacgttatgttctctcccgatgcgtacgaggtcgaatacgtcagtcccaatgtggagaagcttttgggcgtgtcggtcgaagcggtgaagaacaacatacgagcgctgtcggattcggcggccgatccatcgtccgaccctcgaatcgatgacattgcgtcgttggaagagggcgagtgccttcaagtgtttcgcgagcgcattcaagcgcgcacaggagagcgtcgctggtaccaggaaacgttgtaccgggaatccatcaaaggggtggataagtacgtgctggtgctgtccgatcgcacgaacgagcaaaaaggaagtttgatgctcgagcaggcgctcgatatcgcacgatcgtcgaacgaggcgaagagccagttccttgcgaacatgtcgcacgacatacgcacgcccatcaacgccatcgtgggcatgacgaagatcgcacgggaaagcggcgaggccagcgagaagatagccggttgcctcgatgccatcaccgcgtcgtctcgtcatttgctggagcttataaacgacgttctggacatgtcgcgcatcgaaagcgggcagatggagcttcaggagcgtcggttcgacatcgatgacgtcgtgggcggggtagaggccatcatccgtcctcaggctcaggcgaagagtcaagagctgcgcatcgatcgctcgaagatgaagcataaggcgttctcgggagacgagctgcgcataagccagatccttttgaaccttgcgtccaatgcggtgaagtacacgcaggagggcggctccatagccctcgtcgtgcaggagctggcgaaaacgcggcccagctatgcgagcgttgctttcacgataaccgacaacggcatgggcatgtcgccggaattcgtcgagcgtattttcgatccgttcgagcgcagcgaagaggtgtctatcgcgcggatacagggaaccgggttggggatgtccataacgaaggcgctgatcgacgccatgggcggcattgtcgaggtcgacagcgaaaaaggacgaggcagctcgtttcgcgtgacattggaacttcgcgtcgtctcgtcggcggatgcttgtccgccgcttgaagtcgtgccggagagcacctcctatcgattcgagggcaagaggtttctcctggccgaggacaacgagctgaacgctgagatattgatagagcttctcggctgccgcggcgcgaaagtggagtgggccgagaacggcgaaaaggcgatcgatgcattctcgaagcacccggcaggatattacgatgcggtgttcatggacgtgatgatgccggtgatgaacggctacgaggcagcgcgcgctctgcgcgcttgcagcagcgcccgctcggaagaagtgaagatcgtcgcgctgacggccaacgcatttgccgaagatgtgaagtccgcgctcgatgcgggcatggatgcccatgtggcgaaaccggtcgacatagacgggcttgcatgcgtgctcggaaaggtttgcggctga

SEQ ID NO: 1886 - DNA, 1515 bp, Eggerthella lenta
atggatttcaatgagatgctcgtcggcatcaccggcgaggtgagcgggtttctgtacacgtacatcctgctcgtcctgctcgtgttcgtgggcgtgtacttcacgatccgcacgaaaggcgtgcagatccgcttcatcaaggacatgttcacgcagttgacggagaagaagcacgtcaagggcgagcgctccatctcgtcgttccaggcgctcatggtgtctacggcctcgcgcgtgggcacgggcaacatcgcgggcgtggccacggccatcgccacgggcggcccgggcgcggtgttctggatgtggctcatggccatcgtgggcgcggcgtcggcgttcgtcgagtccaccctcgcgcagatctggaaggtgcgcggcaaggagggcgagttccgcggcggcccggcctactacatcgagaaggcgctcggcaagcgttggctgggcatcctgttcgccgtgctgctcatcctgtgcttcgcgttcggcttcaacggcctgcaggccttcaacgccacctcggcgctggaatactacattcccgactacgccacgaacggcacggccatcgcctgcggcatcgtgctggcggtgatgaccgcgttcgtcattttcggcggcgcgaagcgcatcagcgtcatcacgtccatcatcgtgcccatcatggccatcggctacatcgccatcgcggtgtggaccaccctctccaacatcacggagctgccgggcgtgttcgcgatggtgttcgcctcggccttcgacgtgcaggccatcttcggcggattcgcgggttcggtggtcatgctgggcatcaagcgcggcctgtactctaacgaggccggcatgggctcggcgccgaatgctgcggccacggcgtcggtgtcgcatccctgcaagcagggtctcgtgcagagcctgtccgtgtacatcgacacgctgctcatctgcacgtgctcggctatgatggtgctcgtgttctacgtgcaggatccgcaggcggcttccgcccttaacggcatgccgctcgtgcagatggccgtgaacaactcggtgggcgagttcggcatccacttcatcacgttcgccatcttcgccttcgcgttctccagcctcatcggcaactatttctacgccgagaacaacctgcgcttcatcaagggcgacagcaaggcgctgctgttcgtgttccgcgtggtgtgcctgtgcgtggtgttctacggcgccgtgaacagcttcgacttggcgtggaacctcgcggacatcttcatgggcttcatggcgctcgtgaacctcatcgccctgctcttccttggaaaatgggcgcttgcggcgctcgacgactacacgcgccagcgtaaggagggcatcgatccggtgttcgtggccgatcgcattcccggtatgccgaagaccgaatgctggcacgtgtccgaggtgcacgactacggcaagccgccggtcaaggagtatctggacgacgcgctcgaccccgagtacgtcgggctgaactga

SEQ ID NO: 1887 - DNA, 1383 bp, Eggerthella lenta
agaggggccgcgctcgcgcggcaggaaggatgcgccatggcaactgaaagccagatcgctctgtacgagaacttcaaggcgatcaacaccatcgaaaccgcgagctacgaccagttcgacgtgaagcgcggcctgcgcaacgccgacggcacgggcgtcatcgcgggtcttacgaacatcgccaacgttcacggctacgtggtctcagacggcgagaaggtagccgacgagggtatgctgcgctatcgcggctacgacgtgtacgacctgctggacaccagcgtggccgatcgccgcttcaacttcgaggaggtggcgtacctgctgctcatgggcgagctgcccacacaggagcagctcgaccgcttcatcgccgcgctcgatgccgaacgcgaactgcccgacggcttcaccgcctccatgatcatgcgcgacaccccgcccgacatcatgaacatgctgcagcgcaccatcctgctgctgtacgcctacgacgcggacgccgaggatcgctcggctcatcacgagatccacaccgccatctcgctgatctcgcgtctgccgcgcatcatggtgctgacctactacgcgaagcaggctcgatacaacaacggctccatgatcatgcatcgcttcattcccggtcagtccacggccgagaccatcctgtccatgctgcgtcccgatcgccagttcacggctgaggaagcgcgcatgctggacatcatgctgtgcctgcatgccgagcatggcggcggcaacaactccacgtttgccacgcgcgtgctgacctcgtccgacaccgatccgtactccacgtacgccggcgctatcggttcgctcaaggggtcgaagcatggtggcgcgaaccatcaggtgctagctatgcagcaggagatcaagcagaacgtggccgactggtccgacgagggccaggtggccgactacctggcgaagatcgtcaacaaggaggctttcgacaagacgggtctcgtgtacggcatggggcatgcggtgtacacgaagtccgacccgcgcgccatcatctgcaagcagttcgccgagaagctggccgtgggcacggagttcgaggccgagtatcgtctgctggaaagcatcgagcgcctggcgcccgaggtgattctgcgtgaaaagggcaccagcaaggacatgtgtgcgaacatcgacatgtattcgggcttcgtgtactcgatgatgggcattcccgaggatctgttcacgccgctgttcgcgtgcgcgcgcatgtccggctgggctgcgcaccgcttcgaggagatcgtctccggcaagcgcatcatccgtcctgcgtacaagtccattcgcagcggcaagcgcgattacgttcccatgagcgaacgctag

SEQ ID NO: 1888 - DNA, 2637 bp, Eggerthella lenta
atgaagtacatgaccagcgcggagatccgcgagaagtacctgagctttttcgaggagaagggctgcaagcgctggccctcgtcatcgctcattcccgacgacccgtcgttgttgctgacgagcgccggcatggtgcagttcaagccgtatttcctgcagcagaagcaccttgaagccccctacatcggcacgacgacggtgcagaagtgcgtgcgcacgaacgacatcgacatcatcggcaccacgggccgtcaccagagcttcttcgagatgttgggcaacttcagcttcggcgaatacttcaaggaggagatgtgcgcgtgggcgtacgaattctccaccgaggtgctgggcctgccggccgagcgcctgtacttcaccgtgtatctcgacgacgacgagaccatcgagatctggaagaagctgggcgtgcccgacgaccatatctcgcgcctgggcgaggatgacaacttctggcgtgccgggcctacgggcccctgcggcccctgctcggagatctacttcgatcagggcgaggacttcggctgcggcagccccgactgcgcgcctggttgcgactgcgaccgcttcctggagtactggaacctcgtgttcacccagtacgacggacaggaagacggtacgttcgtgccccttccgaagaagaacatcgacaccggcatgggcctcgagcgcatcgcggccatcctgcagggcgtccagtccaattacgagacggacgtgctgcgcagcctcgtggcggtgggcgagaagctgaccggaacgacgtacggcgaggacgcggccatcgacctatcgctgcgcatcatggccgatcacagccgtgccgtggcattcatgatcgccgacggcatcctgccctccaacgaaggccgcggctatgtgctgcgccgtctgctgcgtcgcgccgtgatgaagggccatctgctgggcctcgacaagccgttcctcaacgattacgtcgacgagatcgtgaacctcatgggtcacgtgtaccctgagatcgtggagaaccgcgagctcacgcggcgcgtcatcctgtccgaggaagagcgcttcggctcaaacctgcgccagggccgcgcgttcctcgacgaggcgctggccgagctcgagggcgaggtgctgccgggcgaccgcgcgttcacgctgcacgatacgtacggcttccccgtggaggtcacgcgagagctgtgcgacgagcgcggcatcgaagttgatatggaaggcttcggccgctgcatggacgagcagcgcgagcgcgctcgcgctgccaatacgaaggacgccgaggcggcctggtccacctatggcggcgtgatgaacgagatcctcgaggccgtgggtcccaccgaattcctcggctatacgaagaacgacgccgaagcgcgcgtgctggcgctcgtgaaagacggcgtgcaggtggatgtgctggaggcgggcgacgagggtcgcgtggtgttggacgctacgcccttctacgctgagaagggcggccagatcggcgacgccggcgtgcttgcgaaggacgatgccatcgtggcggtcctggacacgaaggagcccgagaagggcctgatcgcgcacaccgtgaaggtggagagcggtcgcttgagcgcgggcgatgccgtgcatgccgccatcgacgtgccgcgccgcgagcgtatccgccgcaaccacaccgctacgcacatcctgcattgggcgctgcgcgaggtgctgggcgatcatgtgaagcaagcgggcagctacgtcgccgacagccgtctgcgcttcgacttcacccacttcgaggccatgacggccgaacagatcgccgaggtggagcgcctggcgaaccagaagatcatggagaatcatcccgtgcgcgcctacgagacgtcgctcgcatcggcacgcgaagccggcgtcatggcgctgttcggcgagaagtacggcgagttcgtgcgcgtgctcgacatcgagggcttttcgcaggagctgtgcggcggtacccacgtttcggctacgagcgaaatcggcttcgttaagataacctccgagaccagcgtgggcgcgaacctgcgtcgcatcgaagccgtgaccagcttcgacgcgcttgcgtacatgaatcgcgtggaggctgagctcaaggaggcggccgagtctttgcgcgtgcccctgttcgacgtgagcgagcgcacggcatcgaacatgaagaccttgaaagacctgcagacgaagctgaagcgtgggcgcgaggccgtggccgacgacggcatcaacgccttgctcgagaccgcgcagacgagcgctgcgggctatccggtagtgttcggccgcatgccggaggccgatgcgggtcagatgcgcaatatgtgggatgtgctgcgcgcgcgtctgggccagccgggcgccgcggtgctggccacggagaaagacggcaagcccacgctgttggcggccggcacgccggaggcggtggaggtgggcttcgacgcagacgccgtcatcaaggcgatctcggggaacatcaagggcggcggcggcggaaaggccgccatggcgcaggccggcggcaaagacgcctcgggcatcgacgcggcccttcaggctgcgcgcgacatgctgctgtag

SEQ ID NO: 1889 - DNA, 2004 bp, Eggerthella lenta
gtgaccggaaacatgataggcagggtattcaacaaccgctaccagataaccgagcgcatcggcatcggcggtatggcagaggtgtaccgggcgcaggacaacgtgcttggccgtctggtcgccgtgaaggtcatgctgccccaatacgccgccgacccgaacttcacgcagcgcttcaagcaggaagccgccgctgcagccaacctccagagcccctacatcgtgaacgtgtacgattggggtcaggacgagggcacctattacatcgtcatggagttcgtgcgcgggtccgaccttaaaaccgccatcatcgagcgcggcgccatcaaccagcgcaaagtcgccgagatcggctcgcaggtatgccaggcgctttccgtggcgcacggactggacatcatccaccgcgacatcaagccgcagaacatcatggtgcagcccgacggcaacgtgaaggtcatggacttcggcatcgcgcgcgcgaagaattccgtcatgacccaaacctcctcggtgctgggcacggctcactacatctcccccgagcaggcgcagggcaaggacctcaccgccaccagcgacatctactcgctgggcatcgtgctgtacgagtcggccacgggacgcttgccgttcgacggacccgatgccgtgagcgtggccatgaagcaggtcaacgacctgcccgtgccgccgcgcgagatcaaccccgatatcgatcccgcgctcgaggccatcatcatgaaggccatcgcgaagaacccggccgaccgcttcgccaccgcgaaggacatgcgcctcgcgctgaacgactacctggccggacggcccgtcaacctgggcgaaggcttcaccagcgccgagaccgtggtcatgggcggcgtggtgccccccgtcggcgtggccgacggcacggccgtcatgcccgcgatgggcggcgtcagccccgcatcccccaccgcggcgcagcgctcctacaacgcgaacaacaccagcgggaagaagaacaacaagaagaccatcgccatcgtcatcggcatcatcgcggctcttgccgtggtaggcggcatcgcgttcgccctcatgtcgggcagcgggaacgacaaagacaaggtcgccgttcccagcgtggtaggccagacggtggatcaggccacagccgccatcgaaggagccggtttcgagctggggaaggtggaggagtcgttcgacgacaaggtcgaatccggcaaggtgatcagccaggatccgaagggcgacagcaagcaggccaagggcactaagatcaacctcaccgtgtcgaagggcgtgcaagagatcaccgtgcccgatctgacgggcatgactgccgatcaagcgcagaaagcgctcacggccagcgggctgaagtacgcaaagggagccgccgagtactccgacaccgtcgagaaagaccacgtggcgcgccaggacatcgcagcaggcgagaacgtagccaaggacaccgtggtcacgtactacctgtcgctaggctccgaaggcatcgaggttcccaacgtggtgggcatgtcgcgcggaaacgccgtgaccacgctgaataacgcaggcctgatcgtggataccgacaactacacctacgaggccagcgaccagccggaaggcacggtgctcgcccaaacacccgcagcaggctcgaagctgcaaaaggacggcttggtggcgctaacgctgagcaaggggcccgagaagaagacgttctccgtcgcggtcaacgcgaatggaggcggcaagatctcggccagcgcttcgtcggtaaccgagggcgacagcgtcaccatcaccatcacgcccgatagcggctacgaagtagcatcggccagcggcttggacgacgtgccgaagtcaggcggcaccttcaccatctcgaatgtgaaggcgaacgtcaacgtgaacgtgaccttccaggcagttacgccatcccccacgccggatcccaagccaaccgacgacaccaacaagaactag

SEQ ID NO: 1890 - DNA, 1296 bp, Eggerthella lenta
atgggatctaacgaccaacgttccactatcagaaaagtagccgtttcatcgttccttgggaacttcatcgaatggttcgactacgcaacctattcgtacttcgcagtggtcatcgccaacgtgttcttccctggcgacgacccggcgcttgcgctcatgcagacgttcgcggtgttcgcgctttcgttcctgctgcgccccatcggcgccatcttctggggcagcatgggcgacaagaagggccggaagtgggccctgtccacgtccatcttcctgatgaccggcgctaccttctgcatcggcttgctgccgggctacctggccatcggcctcgccgcccccatcttgctgctgctgctccgcatgatccagggtttctcggcttccggcgagtatgccggcgctgctacgttcctggctgagtacgctccctcggacaagcgcggcgtgtactgctcgctcgtgcctgcttcgacggccgtgggcctgttggtgggctctacgttcgccacggtcatgtacacgatcctgcctgacgcagccgtgaacgagtggggctggcgcatcccgttcctgttggcaggaccgctgggtctcgtcgctcactacattcgtaccaagctggaggattcgccgacgtatcaggagatgcaggctgctatctccaagaccgacgactcgaatcatcctatccgcgacctgttccgtcatcacacgaaggagctcatcatctccttcggtgccgccatgctgaacgcggtgggcttctacgtggttctcacgtacttgccggtctacctggagacggtggtcatgatgccggcgaacgaatcgtcgctgatcaccactatctgcctggtcgcgtacgtggcgttcatcttcggcatggggcatctgtccgataagttcgggcgcaagaagatgctcatcatcgcctgtgtgtcgttcatcgtgctgacggtgccggcgttcatgctgttgaacaccgcgcagttcttcacggtgctggccgtcgagctggtgctgtgcctggcgcttaccatcaacgacggtacgctgtccagctatctgaccgagacgttcccgacggcggtgcgctacaccggcttcgccctgtcgttcaacttggcgaacgccctgttcggcggttccgcctcgttcatctcgactgctctgatcgccgctaccggctccggtctcgcgcctgcctggtacatggtcggcgtatcttgtgtcgcgctggtggcgatgatactatcgcacgaacatacgggtaaggatctgtccgaagtgtaa

SEQ ID NO: 1891 - DNA, 1515 bp, Eggerthella lenta
atgtcagacaacgagcccgagaagggcaagaagaaattcaagatgccgaacacctacgtcatcctgttcggggtcatctgcttcatcgccgtgctcagctggttcgtgccgggcggcgcgtacgagctgaacgccaacggcgacgctatttcggggacgtaccacatcgtggagtccaacccgcaagggttgtgggacgtgttcatggcgcccatcacgggcatgctgggttcgggcgccatcagcggcgccatcgccatctcgctgaccatcttgctgttcggcagcttcctcgagatgatggaggaaaccggtgcggtgaagacggcgctcaagcgcatcaccatgaagaaccagaacaatatgcacctgcttatcgccatccttgtatgcctcatgtcgttcctcggcaccttggagggtgcctacgaggaaggaatcgtgtacttcctcatgttcgtgccggtgatcctggcgctggggctggacaccgtggtggccatcatgatcgtggtgctgggcacgcaggccggctgcctggcctcgacggtgaacccgttcgccacgggtatcgcgtcgggtatcgcgggcatctcggccggcgacggcatgggcatgcgcgtgctgatgctggtggtgttcacgggactcgtcatcttcatcatcaaccgctacgccgacaaggtgaaggctcatcccgagaagtcggtccagttcttccgtcgcaagctcgatcttatcgagttcccggtttcggctgacgagaacttggagctgtccggccgtcagaagggcgtgctggccatcttcgtcctcacgttcgccatcatggtggtggggtgcgtgccgtggacttccatcaaccctgattggacgttcttcgagcagttcgtgtcgtggatcggcgtcacgccggtgctgcgcgaggtgctgggcagcgacatcacgccgttcggttcgtggtacttccccgagatcgccatgctcgtgatggtgatgacgttgctcgcgggcatcgtcatgcgctacaaggccgataagatcatcgacacgctgatcaagggcgctgccgggctcgtgtccaccgcgttcgtcgtgccgctggcgcgaggcatccaagtggtgatggacggcgggcagatcacgcccactatcttgcacatgtgcgagagcacgctgtcggccctgcctcccgtcgcgttcgtgattgtggcgctgatctgctacttcctcatcgcgtgcctcattccctcgtcgacggggctggcggccgcgaccatgggcatcatggcggcgctgtcgcagttcgccggcgtggacgtggccatcatggtgaccatctactgcatggcgctgggtctggccaagatgatctcgcctacgtccatcgtggtgatgacctgtacttcggctgcccacatgagctacggcgactgggtgaagcgcgccgcacccatcgtgggcttcctgttcctggtgtgctgcgtgttcctcaccgtggccgtgatgctgtaa

SEQ ID NO: 1892 - DNA, 2028 bp, Eggerthella lenta
atggtcaaacttcgaggaaacctcactgataagatggaagccaatcccggcaaggtgcatttccgccggtggaaggccatgagcatcggatcgcgcatctcgctcgtcgtgctcatcctgatcgtcatgatcgccgtgttcgccaacatcctggcgccgcacaacccgcttgagatcttcacggcacgccaagcccccgatgcccagttcctgttcggcaccgacgacaagggccgcgacgtgctgtcgcgtatgatgtacggcgcgcgctactcgctgatcatcggcctgggcgccaccgccttcgccctcgtgtgcggctccatcatcggcgccgtcgccgccgtggcgcgcaaatgggtgtccgaggtcatcatgcgcatcctggacgtcatcatgtccttccccggtatcgcgctggccgccacgttcgtgctcgtgttcggcaactcggtgccctcgctcatcttcgcgatcggctttttgtacatcccgcagatcgcccgcatcgtgcgcgccaacgtggtgagcgagtacaatcaggattacgtgcgcgccgtcgtcgtttccggcgcccgcgccccctggatcctcgtgaagcacgtcatccgcaactgcatcgccccggtcatggtgttcaccatcgtgctggtggccgacgccatcgtgttcgaagcgtcgctgtcgttcatctcggccggcattcccgagcccacgcccacgtggggcaacatcctgtccgacgcccgcggcggcgtgcttgccggtcgttggtggcaggcgctgttcccgggtctggccatcatgatcaccgtgctgtgcctgaacatcctgtccgagggcatcaccgatgccatggctgccgcgcccaaggccccggtcaaggccgatgacgccgccgtccgcgcgaaccgcgaggccgacaagctcgtggccgaccccacgctggcatacgccgcccaggcggagatgctcgaacagcgcctcagcgagcttcaggcgattgagaagacgcgcaccgaccgcttcgaggcgcgcaccgacgtgccgcctattctggaagtgaaggatctgtgcatcaagttcccgcgccacggcgacgtgaacgtggtcgaccacgtgagcttcgtggtgcgcccgcgccagaccatgggtcttgtgggcgagtccggctgcggcaagtccatcacctcccttaccatcatggggctgctggatccgaaggcgaaggtgtccggcgagatcctctacgacggccagaacctgctgaacatggatcagaagcagatgaacgccttgcgcggtcgcgaaatcgccatgatctaccaggacgcgctctcttcgttgaacccgtccatgctgatcaaagcccaaatgaagcagctcacgaagcgcggaggaacccgcacggccgaggagctgctggagctggtaggactcgatccgaagcgcacgcttgactcctacccccacgaactgtccggcggccagcgccagcgcgtgctcatcgccatggcgctgacgcgcgatccgaagctcatcatcgccgacgagcccactacggctctcgacgtgaccgtgcagaagcaggtcatcgacctgttgaacaagctgcagaaggagctgggcttcgcgatggtgttcgtgagccacgacctggcgctcgtcgccgaggtggccaactccatcacggtcatgtacgccggccaggtggtggagcagggccccgtgtccgacatcctgtgccatcccgtgcacgaatacacccgcggtctcttgggttcggtgctgtccatcgaagccggcggaacgcgcctgcaccaggtgcccggcagcgtccccagcccgaaagacttccccgagggcgaccgcttcacgccgcgctccagccatcctgacaaggtgtcccagctgcgccccgtgctcaagcgcgtgtccgactccgaccactactacgccgagctgcccgacagcgagctcaagcgcctcggcatcaaaccgtacgtcccaggaggtgccatcatatga

SEQ ID NO: 1893 - DNA, 2082 bp, Eggerthella lenta
gtggtcaacatggcagctcctgctaccgaacacgtgcgaaacattgtgctggtgggccaagacggcgccggcaagacatcgctcgccgaagcgatgctgcacgtctccggccgtacgccccgcatgggcacgacgcacgacgggaaatcctacctcgactacgacgatgaggagatccggcgcaaattcaccatcggcacctccattgcccccattccgtacaaggactacaagatcaacctgcttgatacgtccggacaccccgacttcatcggcgacacgctggccaccatgcaagcggccgagatggcactgttcgtggtggacgccgtggcaggcccgcaggtcatgaccaccaagctgtggcgcgaggcggaggacatgcgtctgtcgcgcgccgtgttcatcaaccatatcgaccgcgagaacgccgacttcgacacggccatggcgctgctgcatgcgcgcttcggttcgcgtctggggccggtgaccattcctatcggcgtcgacaaggacttcgagggcgtcatcgacatcatccgcatgaaggcgcgctatttcgatgccggcagcgagaaggagcgcatcgaggagattccgcccgagtacgccgatgccgcccaagccgcgcgcgacaagctgtgcgacctcgtggtcgaggccgacgacgatctcatgatgaagtacctggacggcgaggagcagctcacccaagacgagctcgagcagctgttggacaaggccatcgcgcaggagctgttcattcccgtgttcgtgggctccacgatcatcgagcagggcatccagggcgtcatggaggacatcgccacctacttcccgcatcctcgccatcacgggcgcttccgtctggccaacggcgaggagacgttcgtcgacgagacgggcgagcccgccgcgttcatcttcaagacggtgtccgacccgttcgtaggccgcttgagcttcctcaaggtcatctcgggcgtgctggaaccgggcatggagctgatcaacgcgcgcacaggcaagaaggaccggctgggccacctctacgtgatgatgggcaaggaggccaccgacgtgaagagcgcgaaggccggcgacatcatcgtggtgccgaagctcaccgatacgcgtgccggcgacacgatgtcgaagtcgggcgacgtggccatcgaccccttgccgctgcccgtccctcagtacccggtggccatcgaggcggcgaacaagaaggacgaggacaagctgggaacgtttctggctcgcgcggccgagaacgaccccacgctgatcatcaaccgtagcgaagagacgcaccagacggtgatcacggccatgggcgaggcgcagatcgagacgctgatcgcccgactcaaggagcagacgggcgtggaggcgaagctcatccccgtgcgcattccgtatcgcgagaccatccgcaagacggccgaggcgcagggtcgtcacaagaagcagacgggcggcgcggggcagttcggcgattgctggctgcgcatcgagccgaatccgggagcgggctacgagttcgtcgacgagatagtgggcggcaagattccccgcggctacctgccggccatcgacaagggcgtgcaggatgccatgcgcgagggtttcttggccggatatcctatggaagacatcaagtgtgcggtgtacgacggctcgtaccactccgtcgactccaacgagatggcgttcaagacagccgcgcgcatcggcttccgtgccgcgtgcgagaaggccgaccccattttgctggagcccatggcgaacctcgacgtgacggtgggcgaggagtacgccggcgcggtgatgggcgacatctccacgcgccgcggccgcatcgtgggcaccgactcgaacgacgcgggcgagacggtcatcatggtgcgcgtgccttacgccgaggtggtcacgtacacgaaggacctgcgggccatcacgcgcggctcggggtcgtactccatcgagctggaaggctacgagccggcaccggccgacgtgacgaagaagctggtggaagcctaccaggctgcgcgcgctgcggggaactag

SEQ ID NO: 1894 - DNA, 1860 bp, Eggerthella lenta
gtgaaagcgttgaagagagccggtaaggcggcgaagacgttcgcgtcgatcgtgctagcggggtcgctggtcggcatcggactggtcggcatcggactggtcggctgttccggtgaggctatgggcaatgcgtccggacgcggcgatgagatagtgctgacggtatcgaaataccagaccaaggagctgccgcaggagctgttggacgagatgaccaatcgtcaccccaacctgcgcttcgagttcgatacgtattcgaacagcaactattccgcgcagatcgtcaccgagctcgagcagcgcgatatccccgatatcctgatcaacacgcgcaatcaggatctgaccgaggatttggagcataatctggtggatctcgcggcgtacgatttttccagcgagtaccttcccagcgttctcgatcgcatgaccatcgacggcagcctctactatctgccgggttacctgacgcttgcagggttcttctacaacaaggaccttttcgccgagcacggctgggaggcgcctcagtcgctcgaggaactcattgccctcaacgagcaggcgaaggcggagggcatccggcttatggcgtactcgatggagctgacgggtcaacgcttcctgcagctgaccaatatcgcttcggcgcagtttctgcacacgccgcaggggtcgtcttgggaacaggattatcttgcgggcgaagcgagcatggtgggcacgttcgagcctttcatggacgagtatcagctttggctcgacagcggattgatttcggctgacgacctttccctgtcgaattcggacgccgcggagatgttcgcgaacggtgacgtggccatgatctacggcgttgccaacaacgtgaagaccactgatttcgacttcgatttgggccaagctccgttccttgcgagaggcgagggcgaagataacggctggtacctgtatgcggtcagctcgtactacggtattaacaagaagctggaagagccgggcaacgaggagaagctggccatagcgctggagatgttcgacctgatgagcacccccgagggccagagcatgttcacggatggcgcggaagggcgatatccggccatgagaaaggcggacggcgagctccacgcgccgcttttgagcgattaccgcaacgtggtcgaccgcaataaccttgtggagttggcggcttacactgcgccgctcttgctgggaggagaggcgctgggcgggtacatcgctggcaccgtcagcgccgaggaagcgttgcaggcctgcgacgaggctatgaagtccaacaagtcggaaacccagatcggcgacgtagtggcacatatcgaacgcgacctgagccgggaggagaccgtccgatacttcgccgacgcgttcagggagtacgggggcaccgacctgtgccttatgctgcctggcggcatggcagacgggcaaatgcatccttatgggatttccggcaagctgtacgaaggggagctgcacgccaatgagctgaccgtgctcttgcccaatgcggggaagccggtgcctacgctggccactgcgcgcatttcgggcgaagacctgcgcgcggtgctagagagcgggcgcacgttcgagcggaaggacgcgtcgagggaggcccttgctccgttccgctacgaggtgtcgggagccgaggtggactatgatgcagaccgcaaagtgcgatcgctcaaagtgaacggcgttgaagtcgccgacgaagacgtattcacggtgacgtatttcgacggggcggtcgaaacgtcccgcttgaccgatgcggcggtgtcggacgtgaagcccgtccccgcgttcactgcttgcaaggctgcgcgttga

SEQ ID NO: 1895 - DNA, 1857 bp, Eggerthella lenta
atggaactttctcgcaggaacttcttggtgggcgccgccagcgccggcgtcctcggcgcgatggccgggctgaccggatgcgcgccgcaggcgtcgtccgcgtcggctaagaacggcgacgcgtcgtccgccgacgcggcggtcgcgcgtccgacctattacatgtgcgacgaggattggctgggaagcgcgcccgagatcgccgacgccgacatcaaagagacgaagagcttcgacgtcgtggtggtgggcggcggccatgccggcacgcaggcggcgcttgcggcggcgcaggagggcgcgaaggtcgccgtcatcgagaagcacaacgacggcgagatcgtttaccgcggcgacgacatctgctcgtacaactccaagatgctggaggcgtggggcttcggcccgtacgacctcgacgagatcgtcaacgagtacgtgcgccgcgccaacggccgctgcaacaccgaagtcatccgctcgttcgtgtacaactccggcgagatgatggacaacctggcctcgctgatccccgacacgtcggacgtgttcgactacgagggcggccagtgcatcgtgcagatcgcctacgacaagcccagcggtgccgattaccccgtggaggtttcgggctacaagatgtgggcgtccacggtgcagacggtgggcacgaagaacgagcagcccgtgggcaagaagcagaagacgggcatctcgcgcctgtccgaaatcgaggaatactgccgcgacgcggccgaggatctgggcgccgaatggttctgcgggcagaccgcggcgcgctgcgtgcaggatgccgacggcgctgttaagggcatcatcgccgaggacgccgacggtaactacgtgaagttcgaggcggccaagggcgtcatcctggccacgggcgacttcggtggcaacaccgacatggtgtgggagctgtgctccgaatgcgccgagaacgccgagcgccacggcgtggaccgcgccgagctcatgggcatgaccgactgcgacggatccggtcataagatcgggtgctgggcgggcggcgccatcgagagccatccccgcccggttgcgggcgacgcgccctccatctcgttcggcccttggggctccacgccgtgtctgtggatgaactgcaacggccagcgcttcatgaacgaatcgttcgcgggcctcgtgctggcgcagtcgtgccgccagcctatcaacccggaggccaagatggtgggcaacttcgccatcatggacagcaagtacatgagctacatccaggcgggcggcctcgatcacggcgctcccaactggggcttccccgagggcattgaggagttccaggcgcagatggcggcggcggatcccgctgccggcacggtggaagtgcgcggtttggagatcgcgaaccgcacgagcccgttcgtgaacgagatattcgtgggagccacgctcgaagacgcgctgaagaacgccggtctcgaaggcgaggcgctcgagaacgccaaggccagcgtcgagcgctacaacgagctgtgcgccgcaggcaaggacaccgacttcggcaagccggagaacctgctgatccccatcgacgaaggtccgttcttcgttgccacgcagggcacgaacaagctgtacggccccggcctgaacaccctggcgggcttgtgcgtgaacggcgattaccaggtgctgaccgcttcgaagaacgaggtgatcaagggtctgtatgccgtgggcaacacgatgggcgagcgctacggcaacgcctacaactgcccctcggccggcaacaacatgggcaacgctatgaccagcggccgcgtggccggcaagcacgccgcaaccgcgtag

SEQ ID NO: 1896 - DNA, 3213 bp, Eggerthella lenta
atgaacgctgcatcgcatgtcgaatcgccaatatccggacggaagctgtgcgcattcgcactcgccgcggcgcttgcgctcatggcgggagcacagttcgttcccgcgcattacgcctgggctgaagacgagccggcggcaacggctcaggcggatgcgaccctccctgacgcggccccactcgaggaagccccgcccgaggtggcagccttggcgcccatagagaatgcgccgcacctcgacctgaaggacggttccatcctcttgaaggactccggctcgaacctccaatacagccaggacaacgaggcaacgtggacgtcctattccggcaacgtgacgatcggtggaacggcaggcagcggcacgaacgtgcaagtgctcaacggaacccatgcgatacttctcaacggcgttaccatcaacgagccgcgcgccaatcacgcggcgattgaaatcggcagcgacacgcaggctgcgcagcttacgctctggctgtatggctcgaacaagctttccggttcgagcgggtatcccgcaattttcgcacctggtaaggctcatctgattttcaaaggcgatctctacggcagtctggaagcgcagggaggatacgaggctcccgccatcggtgcggacagcgcggtttcaagttgcggcaccatcgagttttggcaacccggcaacgtaaccgcgcgaagcggcaacggcgcccctgccctcggcgacccgacctcgagcgctgtggatgcaacggggtcggtgtccttcttttcgggaacggtgaccttgcagtcctcaggcacttgcgacattaccgcgaaaagcatcgtcaccggcggcggcaacattcacctctcgcagcgcccgcccgccaacacgacgctcgccgtcgatcagggcggctccttccccagttccgcgtatgttctggtgtcgggcttggcggcaggtgagaatctgctcggagccagttttggtgagaaaggccctgtctttgtcagaggcgatcggtgggtggatgccaagcattacatcgtagacggcttcgccacttggatggacgacggcgatctgggactttttctcgacagaaacctgcttaaggacggcagctccgtcaagatgagctttagcgaatccggcaacgtgtacgaaggcacgatcaagggttctgccgaagccggatacacgcttcatctggccattcccgacccgcctgttgaaaaccccgtcgtcagcatgcacgaaaaaaagggctgcaagctcatcgtcgatgtgagttcggagggcattccgcagtacaccctcgacgggggagtgagttggacgcgctacagcgggtacctggctgtcacgggagccgcagattttacctccttccccgtaagcaatcaggtgatcgtaaggaaaggcactcacgcactgcgctttcaggatctgagcggcgttgcggtttcaatcgagggatcctcgaacgcgacgctcacgctggtgggaagtaattacatatgcggccacagactggaggcgtcgccgggggtggcggttcgaggcacctcgtctcttaccatcaacggcaagggaaccttgaataccgtgggagcaggcacaggtcgtcagccttgcatcctgggagagccgaacacgaccatctcgatagcgggcggcacggttctcgctcattcgggagtaacgggcggtaatggcattactgcaggcaagctcgttgtttccggaggcactgtcgaagcgctcagtcagtcgagtggaagcgcagcgatcacggcgagcaagtccatcgccgtcagcggcgggtcggttaccgccaaaggctccaagttcgtcgctggcatcgggtcggatcattacggctcgtgcggctccatcaccatcagcggcggcatagtgaacgcgcacggcggcgacctgtctgcagccataggttgcagcgtcggcggctcgtgcggggaaatcaagatcagcgggggcaccgtcaacgccgtcggcgggctgggcactcatggagccggccgggtcgcggctatcacaagctccgtcaaggcgcccgtcatcaccggcgggacggtaaaatgcaacgaggcggtttcaacgagggcggcgtctttggcgtcggcatcagcttcgccggctccggcagcgttgaacttcctgctcgcctcccccgtcgcgctcgcgtccgacctggacgaggaagcaacgtctcttgcctccgaggacgagcagcgcttcgtcaacgaaaacaacgacgacctctcgcttgtaacgatacacgggcttccggcgaacacgcccatctcctccttgcagatgcgcctgctcgacacggaattcgtggaagagccgaccggcggcagcacctacggcatgcgcgacgtccagaccgacgaccaaggcgcgctctacctgcacctcacgccgctcgaggcgacggacaagctggtcgtcgcctcgtggaacggccgcaattacagcgggctgagcgagaggaacctggacggaaccttcgccatcgcactcgcccccaccgaggccgccgtgtactaccagtggcacagcttcgaggacggctgggcctacgaggacgccggcgtcgattggagcatcgacgggcagacgagcggaaacgccgccggccacgacgtgaccgcgctgcgcatcgagacgtccatcggcggcttgaacgtttcctacgcggtcgacaacggaagcgggtggagcccggcggttgagaacggcgacatcgcgggcgagatggagcagcccgtgcaggcgctgcgcgtcagcctgtcgggcgacgaggctgcgcgctacaccgtctactaccgcctgtacgtgaaaggcgtcggctggatggcttgggcgcatgacggcaccgccaacggcacgtcgggatacggctaccccgtcaaggcgttccaggtggcgatacttcctgcgggagcgacgcccacgaccggcgaggccagcgcgaccgagtacgcgtacctggtgaaagacggccaaagccagccggggctcatcggcgagaagccttccgccgggcatgaggaacgcgaggctgcgccccctgcgaaggcgctcgcctctaccggcgacagcccggctttcgccatcgccctgggcgcagccctcgcaagcggcgcgctggttcttgcgtcgcgcgcccgtcatcgcaggtcgctgtcctga

SEQ ID NO: 1897 - DNA, 1860 bp, Eggerthella lenta
atgacggactatcgccaaccgccccaacctccgcagccccagcctcggcccgctgcgccccaaccccagcctgctgcgccgcagcctgaagggccgcgggggagccatgtccatcatagctatatctggttgggcagtctgcgcacggcgttcatgctgctggccatcgtggtcttctcctcgttctcggctatcatcggcgccatctccgagggcgaagccatcacgcgcggcgacatccccatgcttttcatcgtcatcggatccgtgatcgccggtatcgtcgtgctggtggcgcttgtggcggtctaccaggtgatctcgtacaagcatctgtactacgagctagggcccgaggaattcaacctgtattcgggcatactcaacaagaagcgcgtgcatgtgccctaccagcgcatccagtccgtcgaccagcacgccacgctcatccagcgcatcttcggcgtgtgcagcgtcagcatcgacacggcgggcggcgcggcgaacaaggccgtcatcgtgccgtatgtgcagaagacgcaagctgaggagctgcgccgcgagctgttcgcgcgcaagcagtacgccgtagccgtgcgcaacggtgccgcgcccgatgccgccgttgcggcgatggcctctgcagcgggcgttcccgcgcaagccttgcacgagggcgccaatgtgctggacgctcccgccgagatctggcaggacgtgcgcggcgtgttcggtggcgccgcggtggatacgggccgcgtgacctacgagtacggcatgtccaacaaggagctcgtgttcaccggcctgtcgaacaacacggcgttcttcgtcgtggttgtcggcatcgtcggcgccgtttcccagttcatgggtcagatggcgcccatcctctccggttcgatggagccgctcgttggcaacgttgtagccacgagcgttcggctgttcgggggcagcctcatcgccgcgggcgtggcgaccttcctcgctgcgtcgctcgtgttgtggctgctgtctgccatcggcgcttgcgtctcgtacggcggcttccgcgcatgtcgccgcgacaaccgcatcgaagtcgagcacggcctgctgcagcaccgcttccagggcgtcgacgtcgaccgcgtgcagtcggtgatggtgaagcagagcttcatccgccgtctgcttggctactgcgagctgtcgctgggcaagatcgatgcggcggctgaaaactccgacgaccagcagaaaggcctcagccagcaagggctcgtgatccatcccttcgtgaagatgtcccgcgtgcccgagattctcgcgggcatcgttcccgagttcgccgacgttcccaccgagaacatcccggtggcgcccgtggggctgcgtcgcgccctcatccgccgatgcatcatccaggggacgggcttctggttggccgtcctcgtggcggcagggcagatcgcggtgaacctcctggcggatccggccgtgcctgacggagccatgacgttgttcttcgtcaacaacggcgcgctgttcggctatgcgcttgcggtcgtgctgctcgttctcgacgcggtaggagccgtgctgtggttccgtggctcggggtttgcgtacaacgagcgtttcatgcaggtgagcaacggcgggttcgctcgcgagaccatcagcttcccgcgcaaaaagatacagttcggttacacgaagacgaatccttttcaacgcaatgccggcaccgctacggtcaacgcgcgcactgcagcaggggttggaggcactaccatcaggcttatcgatgcccgagaggatgatgcccgtgcgtggcttgcttggctcaagccccacggaaatgtgatacagtag

SEQ ID NO: 1898 - DNA, 1608 bp, Eggerthella lenta
gatttgagggcgataaggctgatgaacgtggtggatgcggggtgccgtgatcggatggcgcaggtttcgcttacaatgggagcaagcgatgagggggagggagccttgcaagcgatggtggaacgtatgcgcgattcgaagcacggcgaaagcgcggctatagtggtgtgcgtgatcgcctttgcgatcatgggctgtgtcggcggcattctgaacgcgagcgtgtattctcgcgtggccgaatactacggcatcgctcgggagatttccacgatgacgtcgggctttctgttcttgatcttgtttctgatcgccacgcgcaagccttcgctgctcgatcggcgcttattaaccgtggtggcgctgggctgtgcgatcacggcggcgttcgtgctggagttcgctctgcagatggcgaacggtccgctgacggtggcgggcttcctgttctacaacacggcctccgcgtgggcgtcgatcatgatggtttccgcgttctcgtcgttgcgttcgtcgaaggcggcgcttgcgggggtggtgtgcggcatggcgttgggcgaagtggtgcgcgtggcgcatcctccggtttcgttcgagctgggcattgtcgaggcgacgtgctcgtacgcgctgatcatcgtgatgctgtatcatcgaggcgggcgacagctggacgcgatcgcgcgcgaagcgtccccggccagcctcgaactgtccaatccggaatcgttcttgcggcctgctcacgcactgtttttatgcgtaggattgttcagcgttgcgacgggttacggactcacgctcaacgaagtgtcccatgctcctatcagcgtcgatgtttcggcggtcgtgctggtgggggtggccgcatggatgctgctgtcgcgcagcgagagcaaggaggacatgctgttctcgttcgcgatgctgctggtggtggccggcttcatcatcgcgccgttcacatttttgacggatctgccctcggcgaacgcgcttttgcgcatcggcgtgcgcagctttgacatgctggtgtggcttgtggtgttggcagtggggcggcaaaacctgttggctttgttgccgacgttcgcgcttgtgcgtttcatgagcgcggttggaaccgacgtgggcgcgattgccgggcatgccacgaacgatatcgtgggtacgaatgacgatgcagccatgctcatcgccgaggtcgttttgttcgcgttcgtcgcgtttctgtggttgggattcaggaagttcagtttcgccgacacgatccgaggcgtggtgaacgtgggtgagcgcgaggctgggccggttggggctgctgctgccgaggcagtcggcgaggtgaggtttggcggcgctggcgagacggtgcggcagctcagcatcgaggagcggtgcgttgagctgggtgcgcagcacggcttgaccgagcgcgagacggagatcttcgccatgttggcccgcgggcgcaacgggcagttcgtcatggaacactacgtggtgtcgcgcaacacggtgaagagccatgtcaaacatatctacgcgaagttggatgtgcattcccagcaggagttgatcgacctggtggagcgcgcgggggagtag

SEQ ID NO: 1899 - DNA, 1470 bp, Eggerthella lenta
atggatatcttctccgatcctgtgcttctggcgcgtttgcagttcgcttgcacggcggcgtatcacttcattttcgtgccgttgaccatcggtttgggacttatccttgccatcaacgaaacacggtactaccgttcccgcgacccgaaggacgcggctgccaccaagttctgggtgaagatcttcaccgcgacgttcgtgttaggcttggccacgggcatcacgatggagttctccttcggaacgaactgggcggattactcgaggttcgtcggcgacatcttcggtgcgccgctggccgccgaggcgctgctcgcgttcttcctggagtccacgttcctgggcgtgctgctgttcgggcgcaagcgcgtgtcgccgaagttctacatggtgtcggcctggctcgtgtggttcggctcggctctgtcggccctgtggatcctcatcgcgaactcgtggatgcagaccccggccggcgcggagctgtccgccgacggctcgaaggccgtcatcaccgacttcctgaccgcggcgatgaacccgtcggtatggccgcgctactcgcacaccatcgtggccgtgctcatcatgggcgcgttcgtggccatggccgtttccgcgtggtacctcatcaagaaccgccacaaggaattcgccatgaagacgatgaagctgggcgccgtggtgggcatcgtggtcagctgcgtcatgctggtcacggctcattcctccgccgtcaccgtcgccgaggcgcagcccacgaagcttgccatgatggagggcatgtacgactccgaggtgcctcctctgtacgcgttcgggtgggttgacgaggagaaccagaaggtcatcaccccgttctccatcccgggtggcacgagcttccttgcaaccggcacctgggacaccgagtacgagggcctcaaccagctggccgcttccgccgagtacggtgctctcgatcccgaaaccgcgccggtgaacttcgtgttccagacgtaccacctcatggttgccatgtacggcctcatcatgctcaccgttatcctggcgctcgtattcacgctgcgcggcggcaagatccagaacatgaagtggttgcagcgcctggtgctcatctcgccggtgttcccgctcatcgccattcaggcgggctggttcacggccgaagtcggccgccagccgtgggtggtgtacccgtccgcaaccagccccgaaggcgtcagcctgctcacgaacgagggcgtctcgcagtcggtgtccgctcccgagctggtgatcacgatggtgctgttcctggtggtgtacgcgttcctcatggtcgcgtgggctcgcacgatgggtcgcttcatcaaggaagggccggttgcagagcatgagcctgcgttggagggcgccgctgcgggcaagaccccgaagggcaaagcagccccctcgttcggcgacgacctcgcgaaggaaggtgagtag

SEQ ID NO: 1900 - DNA, 2277 bp, Eggerthella lenta
atgatcgggcttgcggctgccgttgcctccgtggtcatcgtcgccgttatagggggagcgctgctcgtccacgcgtactcggacacggttcgcaatcttacccgcaaagacagcatcggatacttggctgatatatccagccagatcaccgagaacgtgcgcacggtcacctctcagatattctcggcgatggaaaccatcgaacgcggtcagatgacgttggtggagaacggcgccacgctcgacgagctgaacggagaaatggccgaggatagggatcggtggaatctgtcccgccttgcttatgtggacgaggacggcgggtggtacttcgccgacaccacgcagcgctacaccaggtcgcaggactatctcaacaagacgttgcttgaaggcaaacgttccatctcgggtatcgagaccatggacggccaggatgtgctcgtgttttcaattcccgtgaacgcggtcatcgatgggcatcacatgaaggcgcttgcgggcgtgtacggggtggacgagatgctgcagctcctgtccatcgattcgttcgaagggagaggatacgcctgcatcgtcaaggacgacggttcggtggcggtgcgtcccgaggatcaaacggccatcagcggcgagtacaatatcgtgtcggctttggagagccagaacgccgatgacgaagagccggtccacgttctgcgggcggggctcaaaaaaggggagcaaggcgtcgtacttgtgaagtacaacggcgtcagttcgtatttctgctatacgcctgtgggcgtgagcgattggcatctgctgtccatcgttcccagcgattacgtcgatcagaggacgaacagcctgtatctgctgaccgtggcggtgggcgttacggtggcgttggtgttcggcgtgatcatgctgttcatcgtgatcgtgcagcatcgcaatcgtcgacggttggaggctatcgcctacgtggatcctgttaccggcggagacacggccggccggtttcgcgagcgctattacgacgtcgtccgaacggatccgcgtaacttggtgctcgtgtacgccaacatagccaaattcaagtcgtacaacgatcgcgagggcaaggagggcggagaccgtctgctcaggtcggcgtacgacatgatagagcggcagctgcgcgaaggcgagttcgcggcgcgcgtctccgcagaccatttcgtcattctgttgcgcgagcctgacgaggcgtcgacaaaggagcgtctaaacgagttcaggctcacgtccgagagcgtcggcgagcaagtgctcgtgtcgatggacttcggcgcttacgtattggacgacgatgcgctcgagcaagagttcacgctcgtgaccgatgcggctaacttggcgcgtgcgagcgcggagaagcggatgcttccaagcggcgcacgcgttggcttctatgatgatcgcctccgtcggcgcttccttcgagagaaggagctcgaggatcgctttccccatgcgcttgcgaacggcgagtttcatatgtatttgcagccgaaggttgcgctgcccgagcgccgcatcgtcggtgccgaggcgctcgtgcgctggatctctccggaaggtatgctctgcccgaacgagttcgttccgctcttcgagcgcgacggcgttatcgccgagctggatttctacatgttttgccaggtgtgcgctttgttgaagcgatgggagcgggaggggaggccgcttttctgcgtttccgtcaacgtctcgcgctcgaacttcgacgtttcggatttcttcgcgcgctacgagcgccatatcgccgagaaccaggttccggctcgctacctggaattcgagttcaccgagtccgtcgtgttcgatcgcaccgacgagatcaaccaagttattcggcgcatccacgcgttaggcgcacgttgctccatggacgatttcgggagcagttactccagcctcaacatgttgcgtagtctcgaagtggatatcatcaaacttgaccaggggttcttccgtggagataccgacatggacaaggcaaggagcatcgtcaacggcatcgtgggcatagcgcgcgacatgcgtatcgaaacggttgccgaagggatcgaggatgtgggacaggtggatttcctcgagagcgtcggctgcaatgtggtgcaggggtacgtgttcggaaaaccaatgcctgccgatgagttccaggatttcaaactagacgatacgatgaggcgaaacggagatcgcggtgaaagcgttgaagagagccggtaa

SEQ ID NO: 1901 - DNA, 942 bp, unclassified Ruminococcaceae
atgagtgtttcgttcggtttggatacaagcaactataccacatcggctgcactttatgacagcggcaatggtaaatatgtaaattccagacgactgcttgaggttgatgccggcaatgtaggattaaggcaaagcgatgcactttttaaacacataaagaatttgcccgaaattgtacggtcggctttttcggataataaaaaggaaattgatgctgtcggcgtctcggaccgcccgcgttccgctccgggcagctatatgccttgctttcttgcaggcgtttcttcagccactgcagttgctgcggcaatgggaaaacctatatatatgttttcccatcagtcggggcatatcgctgccgccttgctgtcatcgggtcatacagagcttttgaatgaacaatttatttcatttcatgtgtccggcggtacgaccgaagcactgcttgtaacaagagataaagattcgtttttcagagccgatatcgttggcagatcacttgatcttaaaatgggtcaagcggttgacagagtcggcaatatgttaggacttccttttcccgccggcaaataccttgataagctgtcgcttgaggggacactgccggcaaaaccgcgtgtaaccttaagggataccgactgctgcatctcagggttgcagaatcaggctgaaaatcttcttaaaaaaggtgcgctgccctcagaggttgcactttatactataacatatctcaaagatacgcttgataaaatgactgcggctctgaaggtgaaatacggcgatcttccgtttgtctttgcaggaggagttatgtcaaattccattataagacggcatatgacctcaaaatacggagcgtattttgcatcacctgagctttccggtgacaatgcggtcggcatagcctttatgacagatgttaatttcaatgaaaacaggtga

SEQ ID NO: 1902 - DNA, 849 bp, unclassified Ruminococcaceae
atgtcttttcttgttgaacttttaaaaacaatattatacggtattattgaaggtataaccgaatggctgccgatcagcagcaccggacatcttatacttttcgaggagctgttctggaagagcaccgatccggcgttcatggagatgttccgcgtcgttatccagctcggcgcgatacttgccgttatcgtggcgtttttcagaaagctaaatcccttttcgcgtcagaaggacgccattgcgaaaagagccacatgggaattgtggttcaaggtaataatagcctgtctgcctgcggctgtcataggtctgccgtttgacgacaagctggatgaggtcttctacaacttccccaccgttgcaataacgctgatactttacggaatagtatttatagtgatagaatcggtcgatcgcaagccgcctaaaataaagaccatatcagccctttcctataagacggcggcgctgataggcgcgatccagcttctggcactgataccgggcacttcgcgttcgggcgtaaccattataggcgccatgctgcttggctgttcacgcccggtagctgccgaattttcatttttccttgcaataccggtcatgttcggcgcaagccttttaaaatcggcaaaatatgctatgcacatcgcgtccggagaggtcgccatgataaccggcagccaggtaaccgttctcgtcatcggcatggctgttgccttcatagtctcaatagcggctataaaattccttatgagctatgtcaaaaagcgcaattttaagccgttcggctactaccgcgtcgtgcttggcgccgtgctgcttgtgtactattttgtattcagataa

SEQ ID NO: 1903 - DNA, 1158 bp, unclassified Ruminococcaceae
atgtttgattttgataaggaaacagacagaagaaataccggctcccttaaatgggatgtaaaggaaaacgagcttcccatgtgggttgctgatatggatttcgaaaccgcgcctgcagtaataaatgcgataaaagcacgggctgagcacggcattttcggctattcggttctgcccgataaatggtatgatgcatatataggctggtggaaaacaagacacggattttcgattgacaaggattggctgattttctgcacgggagtgatacctgcaatatcaagcattgtcagaaagctgacgacacctgcggaaaaggttgtactgatgacgccggtgtataatattttcttcaattcggtgcttaacaacggcagggttgtgctcgagtgtcctcttgactatagcgacggcagctacagtatagattttaaggcgcttgaaaagtgcctgtccgatccgcagacatcacttatgatactctgcaatccgcataatccgataggtaagatatgggatgccgagacgctcaggcgcgtagccgacatgtgcaaaaagtacagtgtcacggtgatatctgatgaaattcattgcgatcttaccgaccccgggtgtgagtacattccgtttgcctcggtgtctgataccgcaaggctcaacagtattacatgcgcagctccgacaaaatcattcaatattgccggattgcagactgcggcggttatagtacccgatccggtgctgcgccataaggtatggcgctcactgaataccgacgaggtggcagagccgaatgtattcgccgtcgatgcggttgtcgccgcatatgatgagggcgcagaatggtttgacgctctgcgcggttatatttatgataataaaaaatatgcagaagaaattcttgactccttcaaaaacataaggcttgtaaagtcacaggctacctatcttttgtggcttgactgcacggctatgcctcttaaaggagatgcgttggctgaggatctgagaaataagaccggtctttatctgtcgtcgggcagcgcctataaagggaacggagacggctttttgagaatgaatatagcctgcccccgatcccgccttatcgatggcttggaaaggcttggaaggtattcggaaagttgcggatcctga

SEQ ID NO: 1904 - DNA, 1359 bp, unclassified Ruminococcaceae
atgttagacacaagggacatccttgagaccattgacatgatccagcatgataatctggatataagaaccgttacaatgggaatatcgctgctcgactgcattgacagtgacattgacgcagcgtgcggcaaggtgtatgaaaaaataacacgtcttgccaaagatcttgttcccgtatgcgaaagcattgaaaaggaactcggtatacctattataaacaaacgcatttcggtcacacctatcgcgatgatcgcggctgcctgccggtcaaaagatgtagtgaaatttgcactgacccttgaaaaggcggctaaaacggtcggtgtaaactttataggcggttattcggcgcttgtgcaaaagggatttgcggcaggcgagcgggagcttatcgaaagcatccccgaagcactgagtgtaacagagcatatatgctcatcggtaaacataggctccaccaaagccggcatcaatatggacgccgttgctatgatgggcaaagccgtaaaaaaggcggcggagcttaccgccgaccgtgactgtatcggcgcggcaaagctggttgtgttctgcaatgctccggaggacaatccgtttatggcaggcgcttttcacggcgtcggagagcctgactgcgaggtaaacgtcggcgtttcgggtccgggggtcgtccgtgccgccttggcaaaatcaaaagatcttaatttgtctgaggtcgccgaccttataaagcgcacggcgttcaagataaccagaatgggtcagcttgttgcaatgaaagcgtcggaacgtctcggtgtcccatttggaatagttgatctttcgctggcgcccacccctgccgtaggcgattcggtggcacatattctggaagaaatcggtctcgagcaatgcggctgctgcggtacgaccgcctgtcttgcaatgctcaacgacgccgtcaagaagggcggcgttatggcgtcgagccatgtgggcggactgtccggtgcgtttattccggtcaccgaggatgccggcatgatcagcgcggcacgctcgggcgttttaaagatcgaaaaactggaagccatgaccgccgtctgctcggtcggtcttgacatgataaatataccgggagatacaccggctgaggtcatctcggcaataatcgccgatgaagccgctatcggtatgataaataccaagacgacggcggtaagggtcatcccggcaataggcaaggttccaggcgacgagctgtcgttcggcggactgctgggctcaggtccggtaatgccggtaagcacgctctcccctgccaaattcatttcacgcggcggcagaatacctgctccgattcagagtctcaaaaactga

SEQ ID NO: 1905 - DNA, 807 bp, unclassified Ruminococcaceae
atgctgccggaagatcttgaaagcacaccgtttccgataatcgacacccacgcgcactatgacgacgccgcgtttgacggctgccgcgacgagctgctgcggcaaatatacggctacggtgtaaaaaaaataatcaacgcatcggtcgatcttgactcatcggcggaaaattgccttgctttaagccggaaatacccgttttgcctcaccgcaataggcgtgcatcccgaaacggtcgaagcaggcggcactctcgacgagcaaagacttctaagcctgtgccgtgagccgtcggtcgtggcagtaggcgaaataggtcttgattatcattattccgacgataaaaaagccgaacaaagggacatattcaaaaggcagtgcgagatagcgaacgagctgtcgctgccggtcgtgatacacgaccgagacgcgcacggcgacacattggacatagtaagcgaaacgcgccccatgggcgttatacactgcttttcgggcagcacagaatcggcacttgaatactgccggctcggcatgtatatcggcatcggcggagtaataacctttaaaaatgcgcgcaaaacggttgaggtcgcagcggctgtgcctatggaaaatatcctgcttgagaccgacgcgccgtatttagcccctgttccctatcgcggctcgctctgcaattcggcattcataataaaggcagccgaaagaatagcggaaataaagtgtattccggtcgaaacggtacttaaagtcgccgccttaaatgctgcgcggcttttcggcaacgcgctgaaactaaactga

SEQ ID NO: 1906 - DNA, 1413 bp, unclassified Ruminococcaceae
atgaggaaaacaaaaatagtctgcacgataggtccggcatgcagcgatgaaaatacgctgaccgaaatgtgcagggcaggtatgaatgtcgcgcgactcaacttttcacacggaacgcacgaggagcatcttgaaaagatcgcgcttataaaaaaggtgagaaaaaaactgaactaccctatcgcgataatgcttgacacaaaaggcccggaatacagaataaagaccttcaaaaacggcggtgtcactttaaaagacggcgacaccttcaccttcaccacccttgatgttgagggcgacagcagcagagtgtcggtcagctatgaaggacttgcaaaggatctgtcggtcggcgacaggctgctgctcaacaacggtctgctgatatttgaagtaacgagccttaccgacaccgatgttgtctgtaaggtaatagccggcggcgagcttacaaaccgcaagagcatgagcttcccgaacaaggtgttgaagcagaaatatttaagcgatcaggacaaggacgatctgcttttcggcattaaaaacggcgtagactatgttgcctgctcatttgtttcatgcaagcaggatcttatagatgtcaaggaattcatggcggcaaacggcgctgaaaacattgatcttatagcaaagatcgaaaaccgctcaggcgttgacaacatcgatgaaatatgcgccgagtgcgccggtataatgataggacgcggagacatgggtgttgaaattccgtttgaggagctcccggcgatacaaaagcacctcataacaaagtgtcgcctgctcggcaaacgcgtcatcacggcgaccgagatgctggagtccatgatccataacccgagaccgacaagagctgaaatttcggacgttgcaaatgctgtctatgacggcacgagcgccataatgctttcgggcgaaacggctgccggaaaatatccggtgctgaccgtcagcacaatgtcccgtattgctgaacagaccgagcagaacattcattacgaaaaaagatttttaacgtcggaattcaagatcaagaacacagttgacgcaatttcccacgccacatgcggaatggctatagatatcgacgcgaaggctatcgccgtctgttcaatatcgggtatgacggtcagaatggtatcccgtttccgttcaccggtcgatattttaggtcttacgaccaatgaaaaaacgtggtacaaattagccctttcatggggtgtcacaccggtaatgtgtgagcatttcgagtcgaccgacgttctgttctacaccgcaaaacagcttgccgtttctaccttcggtcttaaaaaaggcgaccgcatagtcgttaccggcggcatgaccaacggcgtttccggaaacaccaatattatcaagatagaaaccgtttga

SEQ ID NO: 1907 - DNA, 1101 bp, unclassified Ruminococcaceae
atgcaggataaacgctataaaaggcgtaatgtcgagaagaaaatgaccgtgggaacggttattagaagaatactgctttgcgtaggcacggcgcttcttgcggttattgtgaccgttgtgtcggcatgtcttgtcgtttgctacggaccggggacgaccataagggacacccttgtactgtcggcaaagcaggcgagtgctactaagtggataccggggcttttcctgtcgaaaagtgccgttgacagcatacttgcgagcggcgacgaggtcgatgcggagtatgtgtcgcaggatgaggtcgcaggcgatttttccgaccgctgggcggaaaatccggacgggcttatatatgagccggtaaacggtccgaccttcaaaggatatgtcctgctcataaaatcaccgtcaagggtgaaggtggggcttgcaagcgatgactttacaaggggcgcccgtatatttgaggtcgccgataaatataacgccgcggctgcaataaacggcggtgaatttgaggatatcggcggtatgggcgacggcgcgacgccgataggccttacatattcgttcgggaaatgcgtctggaacgacggaaagaccaggacgttcgtcggatttgacgccaatgacaaaatggtggtcgccgattccatgaccaaggaaaaggctgacagcctcggcatacgcgactgcgtatgctttcagtacggaaatgtgcttataagcagcagcgccgacggcaacgtcaagatcaaccgcagaaacggaaatctggctgtttcgcagcgtaccgccatagggcagtgtgcagacggcacggtcatatttatcgtgaccgacggacgttcggcaagcagtctcggagcgacatacaacgatattatagacatacttttgtcgtacggcgccgtaaacgcagtcatgctcgacggcggctcgtcgtcaagcatgtactatcgcgattggttcacaaaatataacgttgatacgtccgagcttgacacgcatcagaaaaagggtcttgtcagcaaataccgcgcgtttgccgagccgagaaatataccgacctattttatagtgaccaaggaggcggaataa

SEQ ID NO: 1908 - DNA, 1869 bp, unclassified Ruminococcaceae
atgaaacagtatgacatcggtgctattaaaacgatagcgttattgggacatggctcgtcgggaaagaccactcttgccgagtcaatgctgtattatgccggtatgaccgacagaataggaaagaccgcagacggaacatcggtgatggattttgaccctgaggaaaagaaaaggggggtatcggtttcatcatcggtctttcagtttgaatataacgataaaaagataaaccttatagatgctcccggacttttcgattttgccggaggtgttaccgaggcactcaccgctgccgattctgcgcttatcgtactttcgggaaaatcgggactgaatgtcggcgctcagctgaactacgcagccgcgaaaaaggcaggagtgccggtgtcgttttttattggtaagctggattcgccgcgcgcctatttctaccgcgttatttccacccttaccgcccattacggagcggtgatatgccccgtcgttattccgtttgttgagggtgaacaggtcgtttcatttgtagatctgattgagaaccgcgcttataaatatgacggcatcaagagaagcgatgccaaaatgcccgaaagcgacgatatcaaaaatatgcgcgacgttatgcttgaagccgttgcgagcgttgacgaagcacttatggaaaaatactttgccggcgaggagtttgacgctgccgagataaagtcggcgcttgccgccggcatgcagtcgggtgatatatgcccggttttctgcggcataaatcagaccggagccggtgtgagccttgcgcttgacatactgtcggagatagcgcctgcggctgataaacgcgagtatcgtgttaaaaagggagacgctgagggtacggaaaactgcaatgtgtcggcacctgccacagcagtcgtctttaaaacgatcgccgacccgtttgtgggaaagctttcatattttaaggttatttcgggcacattaaaaccggatatgaagcttataaacagccgaacgggcgctgaggagcggcttggcaagctcatgtggataaagggcggcaagcaggaggaagcggcagccgtcggagccggagacattgcgtcggtagcaaagctgggcggagtaaagaccggcgatactttgacggtcgccggaaacgagtgcagcataatagccgaaaaattcccgatgccgggatattcaatggcaataagaccggcgaaaaagggagacgaggaaaaggtggcgtcggggcttgcgagaatattggaggaggacggcgcactcatcgtagtaagcaacaaggaaacaggcgaacagatagtatcaggtctcggcgaacagcaccttgatcttgtcacctcaaagctgaaatcaaaattcggcgtggatgttgtcatgtcggtgcccaaggtggcataccgcgagaaaatacgcaagaaagtaaaggtgcagggcaggcacaaaaagcagtcgggcggacacggtcagttcggcgatgtctggatagagtttgagccctgcgacagcgaagatatggtatttgccgaaaatgttttcggcggagcggtgccgaaaaactttttcccggcggtcgaggcgggcctgcgtgattgcgtaaagaagggcacgcttgcaggatatcccgttgtcggactgaaagccacgcttgttgacggttcgtatcatccggtcgattcgtcagaaatgtcattcaaaatggctgcggcagcggcgtacaaagccggagtaccgatggctgatccggtattgcttgagcctatcggaacattgagccttattgtccctgacgatgtcatgggtgatgcaataggtgatataaacaagcgccgcggacgcgtgctgggaatgaat

SEQ ID NO: 1909 - DNA, 1869 bp, unclassified Ruminococcaceae
atgaaggctaagagattttttgccgctgcactgatggctcttatggttttgggcttgttcggtgcatgtggaaaaaaagaaaacacatcatccggcagtgcatcctccggtcctgatgccagcgaattcatcaacagctacataaataccgctgatgtcagtttccttgatgccgacggcgaggctacataccgcatagttcgtcccgaggaagcatcaaatgatgtttcattgcttggatcgctcgtttttaaaacctacaaggctcagtacaacgtttctccggcaaatgttactgattcggaggagaaaaatgacagagccgaaatactcatcggtaaaactaaccgtgattccactgctaaagcgctgcagattctgaacgcagagggttcgggacgtgccgacgaatatataatctgcactatagacaaagatatagtaattgtcggttcaagtgatgagtctacgattgccgcagcaaattatttctgtgataattaccttaagcagaatcctgtttccggaggaataaattatttcttcagtgatcccaatgcatacaaaccgctcactattttcggattgaaccatctttcaaatattaaggtagtgcgtccgatatataatgtgtcgtatttaacccagaatgagaccaacagccttttggatgcgatacttaaaaacaacggatatgcgcttgagctgcagaaggatcaggttgcttccaacaccggcaataaaaccgatggctcgggaacacttacggtgaccgacgcggcggagtatgaaataataatcggcaactgtaaacgcgacggtgtaaatattatttccgatcctgataaatatgagatacgcattgaagataagaagatattcttaaacggcggcagcgcacatgcgaccgcacttgccgtttccgagtttgcaaagataatttctgctaatactgaaattactcctgcgctatcggttgcgtccggctcgtatgacgaggtcataaaatcatatgacagcgccagcacatataagtgggtatggggcgactattttgacggcacatccataaatgaatcaatatgggatgtcagatgggacgaaggaacgaactatccgaccgatgcgaccggcagaagtcctatgcgcggaagcagcaagctgaaaaacaactacgttaaggacggctgcttctatatagctgcagagatggacactgagcattactacggcggaagaataacgaccgaaacaatgatgcagtacctttacggatatcttgaaatttcggatatccatccgaagggcgtcggtatgtggacctcgctctggggtgtttcggtattggaatccggcaccggtcctataaccgataagaccactatgtaccatagcgagaccgatgttgaggagtgctacggagacggcacatgggtctacggcaatacatttgcgtggcctacggcttacggtaagactcaacttggaataccggcagataagaccggcgctgtgcatgtaaacaatgcaagacacagtgatgacgaccgcggcttctggatggatttccacaccttcggctatgaatgggtcgatcagacccgcgtcaggttcacctgcgatggtgaggcgtatgttgatcaggaactgagggaaggcgccgagcagcttgcctattctcagccgacctatatgcagatatccatggtattcggttcttccaaccagggtcttacgaccgatgagaaggagcttaccgaaaccaataaattcataaccgactggatagctctttatcagaaaacaggtcagacaatgtggcagacttcgcgcaagaatgcgatggactggaagataacacattcataa

SEQ ID NO: 1910 - DNA, 822 bp, unclassified Ruminococcaceae
atggtcacaattatggataacagaccgataggtgtgtttgattccggtttgggcggtctttctgttataaaagagctgaaccgtatattgccggatgaaaatataatatatttcggggacaccggcagggtgccttacggtatgaaaagtgttgaaaccgttgcaagatatgcggctgaggatgagagattccttttgtcgcacggtgttaaaatgataatcgctgcctgcggaaccgtaagctccgtgtcaaagacctttccgccaaagctgcctgttccgtttatcgaggtcgtgactccggcgtcaagagcggcggtaaatactacaaaaaacggcaaaataggcgtgttggctacttcggcgacggtcagcagcaattcatataaaaatgaaatgcagagcataaatgctgggcttgatataatgcagaccgcgtgccctttgtttgttcagcttgttgaatcgggctggatcgaccggcacgacgaggtgacggtcgcgacggcgaaaagataccttaccccgatggctgagcacggcgttgacacggttattttagggtgtactcatttcccggcgataagggagataataggcgatgttttcggcagttctgttgcccttatcaattccggcgaacaggctgcgcttgatgccgaaagattcttaaaggaccatgatatgctgggtcacggcggcagccgcagtttttatgtgaccgaccgcgtgcagatgtttgccgtaacggcaaacacgttattgggctctgaaataggagataaggtagagcttgtcagtttggactgtttcggaggttga

SEQ ID NO: 1911 - DNA, 549 bp, unclassified Ruminococcaceae
atgtattatgaatttttagcgcccggctttgaggagatcgaggccattgcaacgcttgatataatgcgccgtgcaggaatagatgtacggactgttgggataggttcgcgcaccgtgacaggcagccacgggataccggtgacggctgacataagtgaaccggaggttgattttgatgccgcagaaggcatgatactgccgggcggcatgcccggaacactgggacttgaacgctcaaaaacggtgaggaaaatgctgtctgccgcaaacgaaaaaggtctgcttatagcggcgatatgtgcggcaccgtcgatactcggtcacaaaggtctgcttaaaggtaaaaacgccgtctgcttcgagggctttgaggatcagcttaccggcgcgaatgtgctgaataaggcagccgtgtgcgacggcaacatcatcacggcgtgcggagccggagcggcgcttgagtttggcttcatgatagtaaaatacataaaaggcggcgctgccgcagagcatctgagggcttccatgctatgcggccgaacgatataa

SEQ ID NO: 1912 - DNA, 828 bp, unclassified Ruminococcaceae
atgtcaaagttacctgtaggaattcagctttactctgtcagggacgatatgtccaaggacatggcaggcacgatcaaagccatcggtgcgatgggttacgatcttgttgagttcgccggtgtgttcggtcataccgccgatgaagtaaagaaaatgtgtgaggatgccggtgtaaagccgatctcgacacatgttggaatgaatgaagttgccaaagacttccacggtatcgtaaagctttatcacgatatcggctgcaaatattttataattccgtggatcgacaagaattgccttccgggcggcgaaaactaccagaagttccttgacgaaataaaggagctttcggctgaatgtgcaaagtacggaatgaagctctgctatcacaatcacgattttgagtttgagaaggtcgacggcaagaataagcttgatattctctacgcagataccactcccgagcagctccagtccgagatagacacctgctgggcacgcgtcggcggcgaaaatccggctgagtatgtaaagaaatataccggccgcgctcctgttgtacatctgaaggattactacggaagtaagtccgctaatatgtacggacttatagattccggtgattcggataaaaagcaggaaaagactccggaaaattctccgtttgagttccgtccgatcggctacggcgttcaggacattgcttctctgctcaaggctgccaaagacgcaggcgctgaggctgtcatagtcgagcaggatcagccgagcatgggcaaaactcctttggagtgtgcgaaaatgagcattgattacatcagatctctctga

SEQ ID NO: 1913 - DNA, 2499 bp, unclassified Ruminococcaceae
atggcgactaaaagtaaaggtaagaaaaaaagctcctcaaagccgaaaacggcatcacgggctgaaatgattgaggaaagctccgccgcaaaacggcaggtcatatcggtcctgcttttcacgttctcggcgtttctgttccttgccgcgataataaagggcgagagcggctggctcgtcatacataactgtatactcggaatattcggattcttcggctacggtgtgccgtttcttctcggcgccgtcgccgtctttcttgcactcgataagctgcacggcaagacccttgcaaagatgcttgaactgtcggcgcttacgctgcttgtcgcggcatttgtacatatagtagctatagcaccggactgcgacagcttttcaaaatctgtcagcaccgcgtgggacgcaaaatatgcgtcaaccggctttttcggggcgtttataggataccctctctactccatattcaaaaatcccggtgccgcgataatatgcggactgcttatcttccttacggtaatgctgatgaccggcacaacgctcatagcgctgttcaaagctgtgagcaagcctgtaaagcatattgagaaggtagctgaaagcgcatatgaacagcgccgccgtccgcctgccgaggtcgatattccgcttgacggtgatcaacctgcggaggaagaacccgataccgaaacgatagaggaaaagcagaaaaaggtggttacaaaataccgtgaccttgacagtgaggaaacggttaccaatataagctcaaattccgaaaaagccaaaagcaaggcacaggcagcgcaggcacaggcgtcggcagagccttcggaggatacaaaatcggtcgtggcgcgcaccgcagaggcgatatcaaaacgtgccaatgaggaaacgcagccgtcagatactgaaccggcggaagaaaatgaaaacagcacacaaggcggcaacgaaaaggaaaagatcgactttgagcttaaagagggcagctcgataaaggttgagccggatgcggcggaatacaagtatccgccggtgtcgctgctgtcagaacctctgcccgaaagcacaaagagcataacgagcgagcttgaatcgaccgcgacgctgcttgtaaacacgctgtgcagcttcggcgttgaatcacgcattataaatatcagccgcggtccgtcggtcacacggtatgagctgcagcctgcggcaggcgttaaaataagcaagataaccaaccttgcagacgacattgcactgaatcttgcaaccgcgggcgtcaggattgaggcacctatacctaataagccggctgtcggtatagaggtgccgaataagaatacaagcattgtcaagatacgtgaaataattgattctcaggcattctccggcgcaaaaagcaagctgaccgtagcacttggaagagacatttcgggcgatcagcgcgtaacggatgttgcgaaaatgccgcacggacttatagccggtgccaccggttccggtaaatcggtatgtataaactctatcataatgagtatacttttcaaggctacacccgaggaggtaaagttgctgctcatagaccccaaggtggtagaactcggtgtttataacggcatacctcaccttatagtgccggtcgtgaccgaccccagaaaggcggcaggcgcgctcggatgggcggtcgtcgaaatggaaaagcgctataagctgttcgccgaaaatgacgtaagaaatataaacggctacaacgagcttgccgaaaggaccgaagggctcgtcaaaatgccgcagatagtaataatcatcgatgagcttgccgatcttatgatgacatcgccgggcgaggttgaggactcgatctgccgtatagcacagaaggcgcgtgccgccggtatgcaccttattgtcgcaacacagcgcccgtcggtcgatgtcgttaccggtcttattaaggcaaatatcccgacgaggatcgcttttgcggtgtcctcacaggtcgacagccgcaccataatcgacataggcggtgccgaaaagctgatgggcaggggagatatgctgtttttcccgaccggagccataaagccggaacgtatacagggctgctttgtcagtgacgacgaggtcgaaaaggtagtgtcgttcttaaaatccgatcacagatcggactacgacgagcaggtgcttgaggagatagagcgtcaggctgcaaaagaaaagtccgccaaaagcggactgcctgaggacgccgttgaaaatgacggcgacccgatgctgaacgaagcaatagaactggtcgttgaaataggacaggcatcgacctcacttttacagcgcaagctgaggctcggctacgcgcgtgccgcaagggtcatcgaccagatggaggacaggggcataataggtcctgccgagggcgcaaagccgcgtcaggtgctgatgaccaaggatcagcttatggaaatgaaagcaggaagcggcgaggataaagtataa

SEQ ID NO: 1914 - DNA, 1038 bp, unclassified Ruminococcaceae
atgaaaaagttaagatccattgttgccttgctgattgcagcggcaatactcgtatcctttgccgcttgcggcagcaagggcgacggtgccgatagcagcaaagtttcatccgcagcgtcaggcaattcagaaagcgaaagctacaccgccgtcgatatgaccgttgcctgccttaaaggtccgaccggagtcggcatggcaaagctcatgagcgacgcagaagaaaaaaagactgccaacaactacacatttaccgtagcgtccgcaccggatgaactgagcggaaaaatagtttcgggtgagattaacatagcgtcggttccgaccaatcttgccgcaaagcttgccgccaagaccaacggacagatagtcatgcttgccgtgaacaccctcggcgttttgtcgataatcgaaaacggcgacagcataaagtcgattgccgacctgaaaggcaagacgatatattctaccggcgaaggctccaacccggaatacatactccgctacatacttgagcaaaacggcattgattcgaaaaccgatgtaacgataaagttcctcgtcagcaatgacgaactcaacgccaagctcataagcggtgaggctgaggtcgccatggtgcccgaaccggccgcaacggtcgtgcttaccaaaaaggacacattgaagcgcgtcctctcggtaaacgacgagtgggacaaggtgtcagagagccgtctcatgatgggctgcgtcgtagcaaaggcttcgtacataagcgaaaacaaggctgccgtggacaagttccttgaggagtacaaaaattccgtcgattttgccaagagcgacatcgacagcgccgccgcagcgtgcgaaaagtacggcatcgtaccggctgcagctatagccaaggcagcgatacccaactgcaacctgacatttgtaacgggcaccgagatgaagtcggcgataaccggttattttgaggtacttttcggcgccgacgcatcgtccataggaggagcgatgccgagtgacggattctactacaacaaataa

SEQ ID NO: 1915 - DNA, 789 bp, unclassified Ruminococcaceae
atgttcggcagaaaaaaacacagtgtattgctgccggatgcagataagcttccccggcacatcggaataatcatggacggcaacggcaggtgggcgaaaaagcgcatgctgccgcgctctgccggtcatgccgcaggatcggaaaatttcaagaccattgcgagatactgcaataaaataggcattgaatacctcacggtgtatgccttttcgaccgaaaactggaagcgcccgaaggcggaggttgacggtcttatggatctgctccgcaaatatcttaaggactctacaaatttcaaggctgaaaacataagactgcgctttataggcgagctgtcggcgctgcccgaggatataagggagctgatgcggcaggcggagtatgactccaaggacgccaccggtcttgtggtcaacatggcggtaaactacggcggcagggacgagatagtccatgccgtgaaagccatttgccgcgatgttcagaacggaacgctcagtatcgatgagataaacgaaagcacggtctcaaagcggctgtatttaagcgacgagcctgagccggagcttattataagaccgagcggcgagctgaggctctccaattttcttgtctggcagtcggcatacgctgagttctggtattcggatgttttgtggccggatttcaagccgcacgatcttgacaaggcgcttcgcgattttgcaaagcgcgaccgccgcttcggcggcgtggacgaggcagtgtcctcaaaattcaacggtaaaaatgaaaggcggagcaattaa

SEQ ID NO: 1916 - DNA, 1743 bp, unclassified Ruminococcaceae
atgatcgttttgaaaagatggggtaaatatatcaaaccgtatctgccgtattttattatcggtccgttgtgtatgatagttgaagtaatcggcgaggtaatcatgccgcgcctgcttgctatcgttattaattccggcactgataatacgcttacggtcggaaaaagtattacgaccgcgctgcttatggtgcttaccgccgttataatgatggctggcggagtcggcggcgcatatttcggcgcaaaggcgtcggtcaatttcgcaaccgatctcagatcggatatattcaaaaaggtacagagcttttcgttcggaaatatagataaattttcgtcaggctcacttgtaacaagacttactaacgacgttacacagctgcagaatttcgttaatatgctgctgagaatggcactcagggctccgggaatgatgataggtgcgctaataatggcggtacttctcaagccttcgctgtcacttgtgcttgccgttacaataccggttatgataatcgtcataatatgccttatttcggtcggcttcaaaaagtttgtcagaatgcaggcaaaggttgatgcgctcaactcaaatgttcaggaaagcgtcacaaacgtaagagtggtcaaatcgtttgtaagagaagatcatgaaaacaaaaagttcaacagatcgaatgccgagttgaaggaagccggtatgtcggcaatgaaattcatgataatgatgcagcccgttgcgactattttcatgaatattaccacacttgcggtaatatggttcggcagcaagcttgtcgtcggcaacgaaatggaggtcggcaacctttctgcatttatcacttatgtcacgcagatactgacgtctctcatgatgataaccatactgcttatgacttcggcaagagctttcgcgtcggcacgccgcatcaaagaggtgctcgatgaggaaatagatatatccgacgcagctgccgcatgtccaaaagctaaggttgaaaagggaaagatcgagtttaaggatgtttcgttccgctactacaaaagcagcgaggaacctgtgctcgataagataaatcttaccatcgagccggggcagacggtcgggataatcggctcgactggatgcggaaaaacaacccttgtttcgcttataccgaggctttatgacgccgacagcggagaggtgctggtagacgacataaacgtccgcgactattcactttacaacctgcgcgagggtgtcagcatggtgctgcagaaaaatgtccttttcagcggtactattgaggaaaacctgcgctggggcgatgagaacgccacagaagaagaaataaaaacagcatccgagcatgctcaggcggataaattcgtcacctcattcaaggacggttataataccgacctcggtcagggcggatcaaacgtatcgggcggtcagaagcaaagactctgcatagcgagagcgttgcttaaaaagccaaagatacttattcttgatgactcgacaagcgcggtcgataccgcaaccgaacgacagataagaagcgcgcttaaaaacgatctttcgtcggctacaaaaataataatagctcagcgtatttcctctgtaagtgaagcagatcagataatagttatggacgacggacatatcaccggtatcggtacgcatgaagaattgttgaataataatgaggaatacaaagagatctattattctcagaccgataaaaaggaggcgtga

SEQ ID NO: 1917 - DNA, 1101 bp, unclassified Ruminococcaceae
atgaaaatgcttaaagagggcgagatcagaataccttcgggatgtgccatatcgggcatattcgcaaaggacggcagcaaaatcaacggcagccggataataaagtcaatggtgccgatgcatgaccgctcaaacggactgggcggcggctttgccggatacgggatatatccgcagtacgcggactattatgcgctgcatattttttacgacaacaaaaaagccaagattgagtgcgaggaatttttggaccggcattttgagattgccagcccctccgagctgccgaccagaaagacccacgatatactcaatgagccgataatatggcgttatttcgtaaagccgaactttacaaggcttgtatcgagccaccttgacgaaaaggaatacgttgcgcgctgcgttataaagatcaataccgtgataaacggagcatacgtcttttcaagcggcaagaacatgggagtgttcaaggcggtgggatttcctgaggacgtcggggaattctatagacttgaggaatacgacggctactgctggacggcgcacggaagatatccgaccaatacgccgggctggtggggcggagcgcacccgttttcgatgcttgatatgtcggtcgtccacaacggcgagataagctcatacgatgcaaaccgccgctatatagagatgttcggctataaatgtacgctgctgaccgatacagaggtaatagcatatatactggacttccttataaggaaaaagggcttttcgtatgaggaggctgctgatataatcgcggcgccgttctgggacgatatcgacaatatggagcctgccgaaagggaaaggtttctatacctccgcgacaccttcgcaagcctgctcatcaccggaccgttttcaatacttgtcggcttcaacggaggaataatggcactcaatgaccgccttaagctgcgttcgatggtaataggtgaaaagggcgagatggtctattttgcaagtgaggaatgtgcgataagaacgatagaaccggagcttgaccgcatatggtccccgaagggcggagaagcggtcgttgtaagactgaacgaggaaggtgaccggtaa

SEQ ID NO: 1918 - DNA, 1191 bp, unclassified Ruminococcaceae
atgacgcatttcacattttcaaagacaaatttaaagaaatactccatcgtttacccgcgcttcaatatgtcctatcttgtgacacttgaactcgaaaagctgaaaaaagcgataaaggcaataaccggcaaagagcctaagctataccccgatgacggtaaggagcatatatatgaaatagtcgttgcaaacgcaaagagagacaacgcgccggcagcgccggatggcgacggctatgtaatagtgcctgtcgggtgcaggctgtttgcgtcgggcaataagccccattcgtcagcagctgccgtggcaaggctcacttcgctcatcaaaaagcagaacaaacttgacagtgcggtatacggcagctacagtgaagatataaaaagcagcaaaggctaccgccttacatggggagacgactttgacggtgacgaaatagacacctcgaaatgggaaatattctacggcgaccggctttgctacaacaagggcgtcaacgacaaaaagacctgccgctgccgtgaggatgttcccaatacatatgtaaaggacgggaagctaaatatatgcgccgtagagacagacgacacatactatggcggcatgctctgcaccgacggtataatgcggtacaaatacggttatattgagataagcacgcagcatccaaaaggtctgggcttctggactgcactctggatgaacggcgcgccgggcaaaaacggcgactattttgcagaaatagatgttgaggaatgttacggcaacggcggcgactgggcgtacggcaacacctttgcgtggcctaccaaggaatgtaaggaaaacaaaaacggcaagctcgtacacgtcaacaataaagtaagcgcaaaaaacgaccgcggatttttcatggaccttcacaccttcggatttgagtgggatgagaaaaaggtcacctttacctgcgacggattcccgtatgtcacacaggatataacccaaaatcccgcagaggtcgaagcactcaatatgccgtttttcttaagactcagcatggcgctcggattttcttcacgcggcggcataaccgattccaaagaggaatgggaaaataccaaccgatatatagttgattatgtaaacatatatcagaagccggggcaagccttatatctcggaaaggatcagaccgagaagattattaaataa

SEQ ID NO: 1919 - DNA, 1551 bp, unclassified Ruminococcaceae
atgaaaggacttgcatttatgaaaagctatcatgaactgaaatcaggatcggatgtcagaggctatgccagcgacatattcggaaatgagattgagctgaccgataaggcggtctatgacataacggcggcattcgtgccgtttctgtcaaaaaaatcgggcaaagagccggggacgctcaccgtatcggtcggtcacgactcaagaataacggcagagcggataaaggcgcaggttatctcggcgctttgcgacgccggagtaagcgtcatagactgcggtctctcatcaacgcctgcgatgttcatgacaacggtcatggcaggctgtgacggagcggtgcagataaccgccagccaccaccctgccgaccgcaacgggcttaaattcttcctgccgtcgggcggacttgaccccgaggatatagccgaaattttaagcggagccgagcagggcgataaagcccctgcggcgaaaggctcggtcactgcccgtgattttatggacgagtattcaaaaatgctgcgcgaccttatatgtaaggagcttggtgcagccgacggcgagcagccgcttgcaggctatcacatagtggtcgacgccggcaacggtgccggcggattttacgccgaaaaggttctggcacctttgggagccgacacctcgggcagtgtgtacttagagccggacggcatgttccccaaccacataccaaaccccgaaaacgaagccgcaatggcaagcatctgcgatgctgtgctgtcaagcggtgctgatctcggcgttattttcgacaccgacgttgaccgcgcaggctgcgtcgatccggacggggtcgagataaaccgcaaccgccttgttgcgcttgccgcagcgatagtgctcgaaaacgagccgggtgccacgatagttaccgacagcgtgacctcctcaggtcttaaaacctttatagaaaaagatctcggcggtcatcatcaccgcttcaaacgtggatataaaaacgttataaacgaggctgagcgactctgccgcgaggggatcaacgcacctcttgccattgaaacatcgggtcacgccgcacttaaggaaaactattttcttgacgacggcgcctaccttattacaaaaataatcattaaaatggcgaagctcggcagagaaggcaaaagcatttccgaccttaccgcatcccttaaaatgccggtcgaggcaaaggagctgcgctttaacatcttagtcgatgatttccgttcctacggcgaatgtgtcatagagggactccagcgctggtgcagcgccaagtctgacctcggcttcaaaattgccgacgacaaccgcgagggcataagggtcagcgttgacgacggctggtttttgctgaggctgagcgtacacgacccggtcatgccgatgaacatagaaagcgataaaaagggcggcgtgcgtgaaatactcggcatgatagcggagtttttctacggctgcagattccttgacaccgacgggctgcgcctttacctttcggaaagcgagagcgaagatatccaatga

SEQ ID NO: 1920 - DNA, 1149 bp, unclassified Ruminococcaceae
atgtataacagatttgtgctcaatgagacttcgtaccacggtgccggtgcggtaaaggcggtcgccgatgagatcattgcgagaggctttaaaaaggcgtttgtcgcctccgaccccgatcttgtgaaattcggcgtttcaaaaaaggtgaccgatgtgctggatgccgccggtatctcctatgagctgttcagcgagatcaagcccaatccgactatagataacgtaaaggcaggcgtcgccgcattcaaggcgagcggagccgattgtatcgtcgcgataggcggcggatcatcaatggataccgcaaaggcggtcggtataatcatcgagaaccccgagtttgccgatgtcagaagccttgagggcgtagctcccacaaagaaaaagtgcgtgccgataatcgccgtgccgaccaccgccggtacagctgccgaggtcaccataaactacgttataaccgataccgaaaagaaccgcaaaatggtctgcgttgacgttcacgacataccggtggtagccgttgtcgatccggatatgatgtcaaccatgccaaagggacttaccgccgcgacaggaatggacgcgctgacccacgccatcgaaggatacatcaccaagggcgcatgggcgatgagcgatatgttccacttaaaggctatagaaatcatctcgaagtcgctgcgcggcgcggtcgaaaacacgccggaaggacgcgagggcatggctctcggacagtatgttgccggaatgggcttctcgaacgtcggactcggcatcgtgcactcaatggctcatccgctcggcgcgctttacgatacgccgcacggagttgccaacgcgataatccttcccaccgtaatggaatacaacgcaccggcgaccggtgagaaataccgcgatatagcaaaagccatgggcgttgagggaaccgaaaaaatgagcaccgaggagtaccgcaaggctgccatcgatgccgtaagacagctggcgaaggatgtaggtatccctgccgacctcaaggaaatagttgatcccaaggatatagatttccttgcgcagtcggcgtatgacgacgcctgcagaccgggcaatccgcgcgacacaagcgttgccgagcttgccgatctttacaggtctctcatctga

SEQ ID NO: 1921 - DNA, 996 bp, unclassified Ruminococcaceae
atgaaaaagaaaacagcaggtctgcttgttgcaggtgcagtcattgcggctgccgcgaccgctgcatcgctcggattcatgaaaattctgaccaatatagcggtacgccggaaaatagcaacgcttcccgacagcgttcaggataaaatttccggaggactcaaaaccgatccgagaaccaaggtaatggtcgatgcaagtgaggcggctatgtcgctcaagaccgaaacagttaagattgaaagcagggacggtctgacgcttaccggtcattattatccggcggcgtcacccaaaaggcttattatagcaatgcacggctggcgttccacctggatgatggactacggctgctcggttggcttttatcacgatgagggatgcagtcttttgtacgccgatcagcgcggtcagaacgaaagcgacggggattatataggctttggtgtgcttgaaagatatgactgtcttgcgtggataaattatgcggtcgagcgctttggaaaggatataccgatatacctttgcggcgtttccatgggcgctacaacagtgcttatgacaacgggatttgaactgcccgaaaatgtcaaaggcgtaattgcggattgcggatttacttctccgagggaaatctgggagcacatattggcaaataatcttcacctcaatcctaaactgacctatccaatagccaatctcatgtgtaagcaggaggctcagttcgatccgtcggagtattcgacacttgatgcattgaaagaaaataaggtgccggtgctttttgtgcacggatcggatgataaatttgtgccgcttgatatgacatttaagaattatcaggcgtgcaaggcgccgaaggatctgctgatagtaccgggggcggcacacggtatgagcttcgtgaccgatgctaaggcgtacaaaaaagcggtaaagagcttttttgccaagtgcgagcatgatggctggcacagcgcagacgaggttgaataa

SEQ ID NO: 1922 - DNA, 789 bp, unclassified Ruminococcaceae
atggtaccctgcacggcaaacgtacccgtgcaaaaaataaactatctggagagaaaaatgaaacgtaacgtcatatcggcagtaaaaatgaccggcatgcttgcctttgcctgtattatcagcttttttgtctacatttctttctttgtgataataaggcagatatcgaccgatgttgcaggctatacgatctacgaaatagacgaaaacggcaaggcgcacgacattgaaacggtcgaaaaggcgcccgactcgatagcagaaaatcagggctaccgtgaggtgcggaccgatatgccgcaggcagcgactgtgcttatgtcgacactgcaggtcgtctgcggactcgggatagttttctgcaccgtcggctcggtcattgcccgtgacgcggcaagggaccgcaacgatgttgacttcaacggtgcaaaatacgatcctttgcgaggacttaagacaggggcgctgtttgcggtcgttccgtttatactttatgccgtctgccttattatgagactttcgtcgcccactgccgcggctgcaaagagctactattggttctaccgctggatagtgatgtgcccggtaaagccgatagttgatatcttcacaaaaaatgccgccattatggctgacgcttctgtggtgtcgatagcctttagcggagtcacggtgctgctgcttgtggcgttctgtactgtgatgtaccttatatgctataacgaggactcggtgatagctaagttcctttacaaaagtacaaggaaaaaggaaagtaaaaagggttga

SEQ ID NO: 1923 - DNA, 1446 bp, unclassified Ruminococcaceae
gtgagttttgtggctaaagaaaaactggtcagggaaataacctctatggatgaggatttcgcacaatggtataccgatgttgtgctgaagtccgagcttattgattacacgagcgtcaagggctgtatggttataagaccgtacggctatgcgatatgggaaaatatacagcacatacttgacggcatgttcaaggcgaccgggcatgaaaatgtctgcatgcctatgttcataccagaaagccttttacagaaggaaaaggatcacgtggaaggatttgcccccgaggtcgcgtgggtgacctatggcggcaacgaaaagcttgaggagcgcctttgcgtaagacctacctcagaaacgcttttctgcgaccattataaaaatatcatccattcctggcgcgatctgcccaagctctataaccagtgggtatcggtcgtgcgctgggaaaagacaacgcgtccgttcctgcgttcaagagaatttttgtggcaggaggggcataccatccatgccacggcagaggaagccaaggctgagaccgtaaaaatgcttgatatatacgcagagttctgcgaaaagtacctctgcataccggtcataaagggcataaagaccgaaaaggaacgttttgccggcgcggaggagacctatacgatagaggcactcatgcacgacggcaagggactgcagagcggcacgtcgcattatttcggcgacggcttcgcaaaagccttcgggatacagtatgccgacaaagaaaataagctcacatatccgcaccagacatcatggggtgtcactacgcgtcttatcggcgcaataatcatgacccacggtgatgataacggactggttctgcctccggctgtcgctccgaagcaggtcatgataataccgatagcacagcataaagagggtgtgcttgaaaaggcggacgagctgctttcaagactcagcggcaagttcagagtgggtatcgataagagcgaaaacagcccgggctggaagttcgcagagtatgaaatgaagggcgtacctatccgtcttgagatcggacctaaggatatcgagaacggacgctgcgtactggtcagaagagatactgccgaaaagatcgaggcaagccttgacggccttgaggaaacggtcgcaaagctgcttgacgacatttcggaaaaccttttggagagagcaaaggaacgcagggataaaatgacctacgaggcacacgaccttgacgagatcaaggatattgccgacaacaagcccggtttcataaaggcactgtggtgcgaaagccgcgagtgcgaggataagcttaaggaatatgccggcatcacctcacgctgcatgccgctcggtatgcaggagggcatatcggggaaatgcgtttgctgcggcaagccggcgcataaactggtatactggggcaaagcatattaa

SEQ ID NO: 1924 - DNA, 1197 bp, unclassified Ruminococcaceae
gtgtttgatgtgctcaagtgggtcgctatcggcttcgtcggagtttacatattggtgcagctttattcggcggtgatagagcccgttaccaccgacacggtctacacctattcctcattttcgggatacagcgccaaagggtgcataatccggaacgaaacggtggtcgagcacgataacggcggcgcggtgggctacaaggttgaaaacggcggcagggtcgccaaaaacggcgcgatagcggaaattttcgcgagcgatgccgaagccgaagccaacgtcgaatgtgaacagcttgataaacaaatagagactttggagcagctgcaaagctataacgacctcaatgccgcagaccttggcgctttgtcctcaaaaatacgcacggcactgacagatgtcaccgccgctacgcaaaacgggacggtaaccggcggcagcgaacaggcacaaacgcttctgggacttataaatcgcagacagatagtaaccggcgagaccaaggatttcagcgcccttatagcgtcgctgaaagaaaaaaaggctgcgctgggtttggcggcaaagccgacgggtacgcttcgttctcccggctcggggtatgtaatatattcggtcgacgggtatgagaatatacttggcaccgacaatataaccgagcttaccgcagacaaaatgcagtcgcttacgccggaggaaacatccggcagtgccgtctgcaagatagtcggcgactatgagtggtatattgccgccgtcgtgcctttcagtgagtcgctcaacatgaaggagggctcgaccgttacggtaagaacggcgctgcgctcagtgcccgagctgcagtgtaccgtgaaatacataaacaagcagtcggttcaggaaagcgccgtggtgatcctttcgtgcagcacaatgaataccgagcttgcgtcgaccagatattttgacataacggtcatatataaggaatataagggtcttaaggtagataaccgcgcgatacgcgtggttgacggcaataagggcgtgtacgtcgtgacggcgtcgcaggtcaaattcgtgccggtaaatgttctgtggtccggggaaaattattcggtggtggagcagcaggcatcgacctccaaggtgctcaggatatatgacgagatagttgtgaaaggaaagaacctttatgacggaaaaattatcagatga

SEQ ID NO: 1925 - DNA, 591 bp, unclassified Ruminococcaceae
atgaaattcagactgtttaaaatttcctttgaaatttcagtaccgtttgcggttatgatcgcatttcttctgataatggacagaacaggtcttatgactgcctcgcttttcgctgcaacacttcatgagttggggcatatggcagctatgaaaatttccggctgtgcaccgggatcggtcaaatgctgtccggcaggcatacttataacgggaaatgcatataagactgccgctgacagcgcgtttattgcagtatccggaccagccgctaattttgccgcagcgattttgatgctgcttatcggcagagtgacagacagcgtgaccgcttatgcatttgcggctgtgcagcttatagtcggggcggtaaatatgctgcctgttaagggacttgatggcggaacgctgatgctgatactgctgagatcattaaagctgcgttcgccggaatttgttttttcgtttatatcgttgtttacggctgtgggctcggttgttgcaggtgcggcggttgcagtgaaaaatacgtcgaatccgtcgctgctgctgcttggtgtttatctggttgttcttaatattatgaagcggtaa

SEQ ID NO: 1926 - DNA, 951 bp, unclassified Ruminococcaceae
ttcttgaatatacaaaataattctgcaaagggggcgcgacaaatggattacatatattatgaggatttgtatacagagggcggtcacaaaaaaggaatacggtgcatagattttcctccgaccattgtatcgaccagcgaatatccgaaatatagccattatcacgatgcttacgagattttatatgtctaccgtggtgtctttgaggtacggatcgacgggaaaaaccacatgttttatcccggcgaacttgtgataatccagcccggcgaaatacactgtacaagaaccgccacaaagctgcgcgagtatatatgtattcagtttttgcctgaggtacttgagttcgaccgatatttatcggctgaaatcaaaaggcttgtatcggagatcggcaaaaacatcggaacggaaagggtgttcaaaaaagaatgggtagattcgaccgatatcccacaggatatcaggagtattgcgtcggaatgggctgaacgccgtccgggatatgaactgatgatacgctccaagatacgcgatatcatgtcgtggctgttcagatattggtcggaaaatgcggaagagtatatatccgatggtcaaagaacacctgccgataccgaggattttgtcgacagggtgacaaaatatttaaacgaacaatatatgaccgcttcggaaaaagaggcggcaaaggtatgcggatattcagtgagctatttttcgaagctgttcaaccacaccttcggtcagagcttccgtgacaggctgctgaaggtaaggcttgaccacgcggtgaagctgctgcttacgaccgacatgaacataacatctctgtcgtctgccgccggcttttcgtcggtcagctattttattaaaagattccgcgaaagctacggcatgtcgcccaaaaaatacatttcatcgcctgacagcgaacacggtaagctgtag

SEQ ID NO: 1927 - DNA, 1449 bp, unclassified Ruminococcaceae
atgcgcgataaatatgatgtacttatagtcggcgccggactttccgggctttatgccgcctataatcttgacagtcggctttctgccctcgtggtctgcaaaagggatctgaggctttgcaacagcaaccttgcacagggcggcgtggctgccgtgctcgacacggtaaacgacagctacgagctgcatatcaaggataccatgatagcaggcggatacgaaaaccgcccagaagcggtcgaggtgctggtcaaagagggtccggacgatgtgagacgcatgatagacctcggagccgagtttgacatgcacgacggtgagctgcacaagacccttgagggcggtcactgccgccgcaggatagtccatcaccgcgataccaccggcgaggagcttatgcggacgataatagccgcaacaaaggatcttcccaatgtggatatagtcgagaacacctcgcttgcctatcttgacgaggcaaacaacggatattacgccacgctgcttgacggcgacggtctgcatacggtggctgcatcgtacgttataatggctaccggaggtataggcagggtatataaatataccaccaattcgtccatcgccacgggcgacggaatatcgattgcctattcgctcggtgcgaaaatcgaaaacctgagatatatacagttccacccgaccggctttgcaggcgacaactgccgcgagcgcttcctcataagcgaggctgtgcgcggcgagggcgcatacttaataaactgcgaaaagcagcgctttatgcacaggtatgacgagcgtcttgagctggcgccgagagatgttgtctcaaggggcataattctcgaatcgcgccgcaccggaagcgataaattttatcttgacatcacgcaccgcgatcctgcctttataaaggacaggttcccgatgatatatgagcgctgcctaagcgagggtgtggatatgacacgcgaccccatcccggtatttccgacacatcattaccttatgggcggtataaacgtcgatctttcgagccgtacaagaataaacaggctgtatgcggtaggcgaatgtgcccacaccggcgtgcacggcaggaacagacttgcttcaaactcgctgcttgaggcgcttgttttcgggcgtcgtgccgcggaggatataaaccgcagctttaccgattcgagcgtttgcggaaagccgcctgtgcacgatatagacggcgccccgatgccgaccggcaccagaacggcaatcagaagcataatgcagaagtgtcactttgtcctgcccaatccggaggcggcacgcaaataccgtcccgaggtcgaggacattgccgcaaggctcacaaaccgcaaatttatggtgacaaacgattatcttgaggcacgcagtcttgcgaccatcgcctctatagtgctgaaagaggtgtcggaacaatga

SEQ ID NO: 1928 - DNA, 1371 bp, unclassified Ruminococcaceae
atggctgaaaaaataaacgaccgcgactttgaaggcacctcgctgccgttttcaaacgaagcggaacagtcggtgctcggtgctatacttatcgatccgccgagcatcaatatgatacttgacaaactaagaccggaacatttttatattccgcagaaccgccgcatatttgaggtgctctgcagcatgagtgcggcgagtcagacaatagattttataaccgtgcttgaaaaaataaaagaggacggtctgtttgatgctgccggcggaaagacgtatctcaccacacttgcacagtgtgtgccctcgtcagccaatataacgacatatgccgacatagtaagggaacggtattatgtgcggtcgctcatagtttcgtcgcgcgatatcattgaaatggcttcaggcggcgctaccgatgccggcatgctgcttgataccgcagaacgcaaaatatatgaaataagacagggcaaggatatttccgggcttaaactgctgcgtgacgtcattgagggtgagacctttgtaagactgtcaaaaataagtgaccccgaaacgcgcaaggattatatcggaataccgaccggcttttccgagcttgacaagataataaccggactcaaccgctccgaccttatcattgtcggcgccagacccggtatgggtaaaactgcgtttgcactgaacatcgcccgcaacgttgcggtacagtcgtcaaaaacggtatgctttttctcgcttgaaatgagccgcgaccagctggcacagcgactgctgtcgagagaagccatgatagaaagcggaaaattaagaacgggcgatctgacacttgacgagtggacaagactcacccaggcaagccagaaccttgccggtaccgatctttatatcgatgaaacatcgggaataaccgtgccggaaatgaaggctaagcttcgcagaatgaaaaaggtcgaccttgttatcattgactacctcggacttatgcagtcggcaaaaaaaaccgaaaaccgcgtgcaggaggtttcggatatcacaagaaatctgaagataatggcaaaggatctcggcgtgccggtcatagtctgcgcgcagctcggacgcggaaccgaggtcaagggcaagtcgcacaagccggctctgtcggatcttcgtgaatccggctctatcgagcaggatgcggatatagtcctgtttatgtaccgcgatatttattatcaaagcgaaaatgaggatccgaacaatccgatagacgagcataaggctgaatgtatagttgccaaaaaccgccacggcggactcggctctatcgacctatattgggacggtcagtacacccgtttctcgacacgggatgtgatcggatga

SEQ ID NO: 1929 - DNA, 705 bp, unclassified Ruminococcaceae
atgaactcacaaaacgaaaataacgaaaaagaaaacgtctgcgataataaggactggcagcagataaaggagacgggaagcgtcaccccgtcggacggtaagcatgtcatacactgccttacaataataggtcagatcgagggacacagcgttctgccgtccgataccaagaccacaaagtacgagcatgtcataccgcagcttgtcgccgtggaggaggatccgcgcatcgagggtatgatgatagtgctcaataccgtcggaggtgacgttgaggcgggacttgcccttgcggagcttatttccggcatgaaaaaaccgactgtgtcattggtgctcggaggcggacattcgataggcgttccgcttgcggtgtcggcaaaatgctcttttatagtgccgtccgccacgatgacgatacatcccgtgcggactaacggactggtccttggcgttccgcagacgctgtcttattttgaaaagatgcagaaacgcataaccgactttgtggtcagcaattcaaaggtgaccgccgagaaattcaggtcgcttatgatgaacaccgacgagcttgcgaccgatatgggctcagtccttgacggcaagctggcggtggaatgcggactgatcgaccacataggcagcctgtccgatgtgataagcaggctgtacagcatgatagaaagtgaaaaaggcggacagtga

SEQ ID NO: 1930 - DNA, 588 bp, unclassified Ruminococcaceae
atgatacatctcgataaggcggttatagtcgagggcaagtatgacaagatacggctgtcgtcgtttatagacgccgaaattattacaaccgacggtttcgggatattcaagaaccgagaaaaggctgagcttataagaaaagccgcaaataagcgcggtattataataatgaccgacagcgatggcgccggctttcttatccgctcgcatctttccggcatagtaccgcctaataaaatcacaaacgtctttataccccagataaagggcaccgagcgccgcaaaacagcggcgtcagccgaaggctttttaggggtcgagggtctttgtgaacagataataaccgatgccttgaaaaaggcaggcgtgattttcagccgcgaaaggcgcggcgaaccggtcacaaaggcggatctttatgagctggggcttgtaggaggcgcggacagccggaaaagaagagagcttttagagcaaaggctcgaccttccgcacggcatgtcgtcatcgcagcttcttaccgccataaactgtatttacgaccgcagcgagtttctgaatctattttccgacggaggacctttatga

SEQ ID NO: 1931 - DNA, 1764 bp, unclassified Ruminococcaceae
atggcaagcggaacgatcgtcaaggtcgcaggacctctggtaatagccgagggcatgcgcgacgccaacatgttcgacgtggtgcgcgtcagcgaacagaagctaataggcgaaataatcgaaatgcacggagacagagcctccatacaggtatacgaggagacctcgggtctcggccccggcgaaaaggtcgaaagcaccggcatgccgctgtcggtcgaattgggaccgggacttataggatcgatattcgacggtatacaaagaccgctcgaaaggatcatggaggtatcgggcaccaatcttgagcgcggagtcgacgtaccaaagctcgaccgcgagaaaaaatggcacttcacaccggctgtggcggtgggtgataccgtaaaattcggcgacaccctcggcacggtcgatgaaacacatatagtaaagcataaaataatggcgccaaaaggtgccgacggcgtagttgccgacataaaggaaggcgacttctctttggaggacaccgtctgcaccgtaaggaccgaaaagggcgatatgccggtatccctcatgcagaggtggccggtgcgtgtcggcagaccgtataagaaaaagctgtcgcctgacattccgcttgttaccggtcagcgcgttatagacaccttcttcccgatagcaaagggcggtgtcgccgccgttcccggaccgttcggatcaggcaaaacggtcgtgcagcatcagctcgcaaaatgggctgccgccgacatcatagtgtatataggctgcggcgaacgcggaaacgaaatgaccgacgttttgaacgaattccccgagcttcgggatccgaggacaggcagctcgctcatggagcgcaccgtccttatagccaacacctccgatatgccggtcgctgcccgtgaggcttctatctacaccggcatcaccattgcggaatatttccgcgacatgggatataccgtggctttgatggctgactcaacctcgcgctgggctgaggcgctccgcgaaatgtcgggacgtcttgaggaaatgcccggcgaggaaggatatcctgcgtacctcggcagccgtcttgcccagttctacgaaagagccggtcgtgttatagtaaacggcggcgatgagaccgagggcgccttgtcggtcattggcgccgtgtcgcctcccggcggtgatatttccgagccggtatcgcaggcaacgctgcgtatagttaaggtgttctggggactggattcgtcgcttgcctacaagcgccacttcccggcgataaactggctcaccagctattcgctttataccgatatgctgtcggactggttccgtgaaaacgtaaaggacgactggatggagctgcgcggcagactaatgtcgctgcttcaggacgaagccgagcttgaggagatagttaagctggtcggtatggacgctctgtccgcacccgaccgtctgaagcttgaggcagcccgttcgataagagaggactacctgcatcagaacgccttccacgagaccgacacatattcgtcgcttgacaagcagtactatatgatgacggtcattctggagttttacgacaaggcacttgccgctttgaaggacggcgccgacataaacaagatagtcgcaatgccggtaagagaaaaaataggcagactgaaatatgctgccgaggacaaggtcgccgaagaagcagccgatatagtaggacgccttgagaccgagcttgcaaacgcaagaccggacgaggattaa

SEQ ID NO: 1932 - DNA, 1239 bp, unclassified Ruminococcaceae
atgttaatttcaatgaaaacaggtgattttttgaacacggctgtacttacggtttcacagcttaataagtatgttaaactgcttttagacagcgataaaggtttgaattctctgtttatttccggggaaatatcaaatttcaagatcaattcattcagcggtcatatttatttttcgttaaaggatgaatcggctgctgtcaggtgcgttatgttcaaaagcagcgcggcaagaattaaattcatgccggaagaaggcatgaaggtgatatgccgcggcggcgtgaccgtttatgaaagggacgggcagtaccagctgtatgtaaatgatatgcagccggatggcgccggcagcatagcgattgcgttcgaacagcttaagaagaagcttgcctcggaaggtctatttgatgctgcaaaaaagcgtccgctgccgaaatttccgaaaaccgttgcagttataacatccgagaccggtgctgccgtacgggatattatcaatattctgggcagacgctggcaaatggcaaatgtcttgttgtgccctgtctcggttcagggcgataacgccgcaccgcaaatgataagcgctttgaaatatgtaaatgataacaggctttccgatgttataataatcggacgcggcggcggatctgccgaggatctgtggtgcttcaacgatgaattgcttgcgcgtgcggtcgttgcatcggctatccctgtaatatctgccgtaggtcatgagaccgattttacaatttgtgattttgcggctgacctcagggcaccgacgccttccgctgcggcagagcttgcggtgccggacggcagggaaataagatcggtgattacggggattgatgaccgtatgaccttagctgtttgtcaaaaggtaggcgcctgtcatgacaggctgaattcggctgtttcgggcagaacgtggaacaacattttgtcgttcttttccgaaccgtcgctgcgtcttgacaacgtaaaaaataaactggatcatgcttttaggcagctgtttaccgacgatacttccaagcttgcgctgcttatgtcaaagctggatgcactcgatcccatgaaaatattgcttcgcggcttttcggtcgttaaaaagcgtgacgctgttgttaaaagcgtcggcgagctgaaccagggcgacagattagttgttaatttcagtgacggaactgccgattgcattgtacaatcaaccgaaaggacaaattaa

SEQ ID NO: 1933 - DNA, 1257 bp, unclassified Ruminococcaceae
atgaaggcgatatgccggaaagggagtaatataatggcaagatttacattaccgagagatatttatcacgggaagggctcacttgaggctctcaagagctttgaaggaaaaagggctatgatctgcgtcggcggcggaagcatgaaacgcttcggcttccttgacagggcagagagctaccttaaagaggccggtatggaggtcgagatattctcaggcatcgagccggatccgtcggttgaaaccgtaatgcgcggtgctgccgcaatggaaaaattccagcccgactggatagttgctataggcggaggttcgcctatcgacgccgcaaaggctatgtggataaagtatgagtatcccgacatcacatttgaagatatgtgcaaggtgttcggtattccgaagctgagaagaaaggctcatttctgcgctatttcctctacctccggtaccgcgaccgaggtcactgcattttcaataatcaccgactattcaaagggcatcaaatacccgatagccgattttgagatcacacctgacgttgcaatagttgaccctgagcttgcagagaccatgccgcagaagcttgtcgcacatacaggtatggatgcaatgacccatgctatagaggcttatgtttcaactgccaacagcgattataccgatcctttggctatccacgccatcgaaatgattatggattcgctcgtaaagtcttataacggcgatatggaagcgagagacaggatgcacaacgcacagtgccttgccggtatggctttctcgaatgctctgctcggtattgttcactcgatggctcataagaccggcgccgcttttgcggactacggctcacatatcatccacggcgctgctaacgcaatgtacctgccgaaggttattgccttcaacgcaaaggatgagaccgcgaagaagcgttacggcgttatagttgattacatgggtatctgcgataggtcggcttccgacgatgagaagatcgccgcacttataaagtacctgcgtaagatgaacgacgagctcaacattccgcactgcatcggacattacggaccggacagctatccggcagagaaaggctttgtacccgaggaagtattccttgagagactgcatgatattgcagtcaacgccattgcagatgcctgcaccggatcgaatccgcgtcagccgagtgttgaggaaatggaaaagctgctcaagtgctgctattatgacaccgaggtcgatttttaa

SEQ ID NO: 1934 - DNA, 762 bp, unclassified Ruminococcaceae
ttgaaaaaagcgggcggaatactgctgtcggtcatattctggctggcagtatggcaggcggcaagcatgctgatagcaaacgagctgaaactgttcctgccggctcccagcgccgtttttggccgccttgccgaactgctttgcaccgcaggattttacaaaaacgcaggcagtacgctgctgaggatattctgcggatttgtcttaggctcggctttgggactggctttcggcatatttacctttgcgtctaaagcggcaagaacggtttttgcacctgcaatgcgcgtcataagggctgtgccggtcgtttcctttataatacttgcatttttgtttataaaggttgacaggctgcccgtattcatttccatgctcatggtcatgccgacggtatggcagtcggtgcatgacggactttgcggcaccgacaggcagcttaccgagatgtgccgggtatataaggtaggaaaggtaagggaactgtttgcggtgaggctgccgcttagcggaccggaggtggtcaccgcggcggtaaacgcgctggggcttgcctggaaatctggcgtggctgccgaggtgctgtgcacccctgcggggtcgatcggctacagcctttcaagggcaaagggaaatcttgattttgagggcgtatatgccctgacgcttaccgttgtggtgctgtcggtgctgtttgaaatagtgctgaagctgctttgccgccattttatcacgggaggaaacgaaaatgctgaggcttga

SEQ ID NO: 1935 - DNA, 1599 bp, unclassified Ruminococcaceae
ttgaaaaatatcgattggaggatactcatgacaaagtatatttttgtgacaggcggcgttgtttccggactcggaaagggcgtctgcgcgtcggctctcggcaggctgctgaaatcaaggggctaccgcgtcgccatgcagaaattcgatccttatataaatcttgatccgggaagcctcagccctctgctccagggagagaccttcgttaccgacgacggcgcgcttgagggcgtcaacgtcggtcactatgagaggtttaccgatgaaaaccttaatgtgaattcaaatgtcaccaccggacgtatatattataatgtcataaataaggagcgccgcggcgaatacggcggcaaagccgtccaggtaattcctcatgtcacatccgagataaagagcctcgtttatgcgctcggcaacgcagaggatgtcgatatagttataaccgatatcggcggcaccgtcggcgatatcgaaagccagccctttttggaggctatacgccagatagcctcggaggtcggcaccgaaaatgcgctgttcgtgcatgtaacgctggtaccttttatttccggatcgagcgagctcaagaccaagccgacccagcacagcgtcaaggaaatgctgtcaataggcatccagcccaatattctggtctgccgctgcggtctgccgcttgaggaatcaatgagggcaaaaataggtcttttctgcaacatagaaagcaaggatgttataccttatatcccagcgccgtcggtctatgacgtgccgctcaatcttgagtatgagggacttggcaaagccgtctgcgatcatcttgagcttaaaaacaccgagcccgaccttaccgactggacacttatggtcgaaaacggcaggcagccggagcacgaggtgaaaataggtcttgtcggcgaatatacggaatatcacgacgcctacctttcggttgcggaggctgtcgatcacgccggatttgcaaccaaaacaaaatgcgatgtaaagtggatatgctcaaacaccgtaactgccgacgagctttcgggtcttgacggcgtaatagcggtgggctatcgttcggaaagcggtctctcgggatacgagcttgcagcgaagttctgccgtgaaaatgatgtcccgttcttagggatcggcggcggcatgctcggcgccgtgaccgaatttgcaaaaaatgtcgccaatattgaaaatgccggatcaaccgaattcgaaccggactgcacacctgtagtagcggcacttgttgatgccgttaccggggacacccctgtagcgcgcaagggacttgccccctgcaaaatagccgaaggctcgctgctttacggaatttacggcgacgagcttatatacgaacgccacaactgtgaccatgaggtcaacagcagcttccgacctgcgctcagcgcggcaggcatgaagttttcggcgctgtcccctgacggacacctgaccgaggctgtggagctgcccggaaagaaattctttgtcggcgtccagtacgcaccgcagtttgtgtcgcgtcccaaccgcgcacaccccgttttcaaagcgtttgtcgaagccgctttaaaataa

SEQ ID NO: 1936 - DNA, 1518 bp, unclassified Ruminococcaceae
atgaatcagcataagaaaagaaaaatcggaggagctgctatgacgaacactgagatatataaggatatcgcggaccgcaccggcggagatatctacataggcgttgtgggaccggtcagaaccggaaaatccaccttcatcaaaaaattcatggacacacttgttatccctaacattgaaagcgaatactcgcgcgagcgcgcgaatgatgagctgccgcagtctgccggcggcaggacaataatgactaccgagccgaaatttgtacctgaaaagggcgtcagtattacgctcggtgacaacatcggtatgaacgtaaggcttatagactgcgtcggttatatcgtaccgagctcgctcggatacatagaaaatgacgatccgcgcatggtcatgacgccatggtttgaacagccggtaccctttaacatggcggcggagtttgggactaaaaaggtaataacagaacattccacgataggacttgttataacgaccgacggcagcatcagcgaaataccgcgcagcgaatatgccgaggcggaggaaagggtcataaacgagcttataagcattgataagccgtttatagttcttgtaaacagcatgtacccggagtccgacgaggcgaaggctgtggcacgggaaatttcggaaaaatacaatgtcgccgcaaaaacggtaaactgtctggaacttagcgaggacgatataagagatatactttccgaactcctttatgagtttccggtaagggaaatcaaaattcatctgccgatgtggataaccgcgcttgacggcgagcactggctgcaaaagcagctgtattccgcagtaatgacttcggcggctgatataaagcgtgttgccgatataaacggatttgtaaaacggctgtgcgactgcgaaaatatagatcatacctctgtacttaatgtcgatctcggaagcggaagcgcatgcgtatcggctgaggtaaaccgcaagctgttctacgatgtgctcaaagagtcaaccggaatagagataagcaacgagcagcagctcatgaaggaaataatcgaattttcggctatcaagcgtgaatattaccgcttcaaaaacgcgctcgacgaggtcgaggcgaccggctacggcatagttatgccggagataaacgaactcaccctgcaggaacccgaaatagtaaggcagggcggcagatacggcgtaaggctgcgtgcatcggcaccgtcgatacacatgatgaaagccaatatcaccaccgaggtctcgccgatagtcggttcggaaaagcagagcgaggatcttgtcatgtatctgctcgacgaattcaaggaggatccgacaaagatctgggactccaacattttcggaaaatcgctgcatgagcttgtgaacgaggggcttcacaccaagctggcacggatgccggctgacgcgagaatgaggctgcaggaaacgcttgaaagggtgataaacgaaggctgcagcggactaatatgtataattctttaa

SEQ ID NO: 1937 - DNA, 1545 bp, unclassified Ruminococcaceae
gtgccggtcgatgtttataacagaataaagtcaaaaatactgccgacatacaaatttgctttttgtttttcggtcattttcgggtttatcgctcacttttaccgcatgacgaactggctgccgaactgggactctcttgttttccgcaatgatccgcagcatatggagtcactgggaagatggtttttgccgtatgcatcagggatcagcagcaactacgagctgccgtggctcaacggcatactaagtattctatatatcagcattgcggtcgttttcatatgcaaaacctttgatgtcaaaggacggctcacagccgctctgatcggtgccgtgacggtgacctttccaaccgttatatcgacctttacttactgctatgttaccgatgcgtattcgctggcatttcttttctcctgcatcgccgtttaccttttaacgcacaaaggactcttggcgacgataccggctgtggcactgctgacgctgtcattgggcatttatcaggcatatatcacggtcgcgatagcactgctgatgtgcagcctgttaataaggctcatctccggtgagagcacatgcaaagtgtcgcttaaaagtgcactcaagtacttagtctgcggtgccttgtcacttttactttactactgtattaactccgccgttatggcgcttatgcatgtagaatcgtctgattatcagaacatttccggcacattcagctttaaggaatttgatcttatatcggctatcatatcggcttattatgtatttttcaaattctttttcgattttgacggtggctttaacctgtactcagccgtcaatatcgcagtctatgctgcgctgcttatcggatatgcggcattggcggtcaaaagtaagcgccgcatagcggcatgtctgctgtcattggcttacattgtgctgataccgctcggctgcacggcgctttaccttgcaaacagcggtcttgactatcataatctgatgaaaatgagctattttatagcatacatatatctactgctgcttttggaaaggctggatttcaaggcggcgctgccgcaggctataaagacatggaccgtaacggttttgtgccttgccgtggtatttataaacaccgtgaccgcgaatgtggcttaccacaagctgcagatcgcgttttacagatcgtacggaatacttgtaaggatatcagaccgtattgagtcgcttgaaggctctgaaaattttcaaaaaatacttgtgataggctcacttgacgattcagaaagctattccgtgaattttccgcccgatataaccggcacgaccgacggtcttatcatacgtcacgacgacgaaacggtgggtcagagcgttatcgcatcggcactttgcgattactgcgatatgtcgctcgaatttgttcacggcgatgaggcagatgcgctcaaaggcaccgaagcagtaataaacatgccctgctggccaagtgacgggtcggtcgctgcactcggcgaaacggtcatacttaaattgggcgaggaagtgcgctga

SEQ ID NO: 1938 - DNA, 537 bp, unclassified Ruminococcaceae
ttgttcggctataacaaagaagacgtaatgaactatgttacaatgctcaattccgagcttgccgaactgcgcggtaaatataaaagggaagtcgatgatcttattgataagctgaacgaccagcagattcgaaatgacgagcttggaaaactggtaggcgaacaggctgttaagatcgacgaatacaggcagcatgaagaggcggtgacgcgcctcagcgaaagcataggtaagctttatctcgttgcaaaagccaatgcagccgggattatggagtctgcaaagcaaaatgctgagcagtctgagctgatcgcaaaaagcaccatagatgttacgcagacagcgcataatgagctgcagggtattaaagatgaacttgcggaaaagatagcacgtttcagcgatgaattggatcagctcggcagcaggataaatgttgccgaacgtactgtgactgaaaatgttagatctgtaagtgaaaaaagcgtagaatatgaagatgtttcacacgcagtcgcaaacagtgtcgagcagtga

SEQ ID NO: 1939 - DNA, 1155 bp, unclassified Ruminococcaceae
atggcggattataataaatataaggattttttcgacagctacggcggcgatcatgaatacgatgcagaagccgaataccggcgccgcaggcttgccgcgaaaaagaaagcattgaaaaggaagcgccgttttataaggtgtgtgaccgctcttttccttgccgtcattgtagcggtggctgccgtggtgaccgtcacggtcaaaaagcattccaaaagcaataatgcatcatcagacgtatatacgatacatgagataacgagcagcggtcaggaaaccgggcagcaaagcgagcctcagatcacggcacctgtttcaacatctgcaaccgtaaagctcggcagccagatagacagccaatatgccatacttgtcgattgttcaaacaataatgttcttgccgaaaaatctccggatgagcggatctatccggcttcaatgaccaaggtcatgacactgcttgtcgcagccgaaaatgttgacagcatcgatggcagatttacaatgaccaatgaaataatagatcctctttataaggaaggtgcctcgcgcgcaggattctgtgcaggcgaaaatgtcagaatagctgacatgttttacggcacggtgcttgaatccggcgcagaagcagctgtcggtcttgccgtatatgtatcgggatcagaggaaaaatttgttgagctgatgaaccaaaaagctgcacagttggggcttacgtcaacactcttcaccaatgtcaccgggctgcatgacaaaaatctttacacgacctgccgcgagatggcaataataatgcgtgcagcgcttgaaaatgatttttgcaagaccgttctttcaacagaatactacaccgtcgctgcaaatgattttcacgatgaacttaaatttcacagcacgatgctcagccgcatgtacggtaccgagccgggcgttgcgactataaagggcggaaaaaccggttttactgccaattccggcaactgccttgtcagttatgcagaaaccgacgacgggcgtgagataatatgcgtcacggcagtcggcggcggacgctacaagccgatattcgactgtataaacatgtataaggactatactcacccgtcacagacggcaagtgcgtccagcggcactgcatctgcgtctgaaaaataa

SEQ ID NO: 1940 - DNA, 492 bp, unclassified Ruminococcaceae
atgctttgtcagaaatgtaaacagcgcgaggcgacccggcacatacgctcggtcgttgacggtgtcgtgaacgactcgtatctatgcgaaaagtgtgccgagtcgctgaaggtgaccgatatttacggaagcgagctgttcaagatactgtcgtcgcttatagatacaaaggaagaagcggatactccgcgctgcgattgctgcggtatcagcttcaatgaaatatcgagaacaggcagggtcggctgcgcgaggtgctataaattttttgaaaagcagctgcgtcctgccattgcaaagatccacggcgccacgacccacgcaggcaaggtgccgaaaagacctgaaagttgtgaggaaggcactgccgacactgaaaatatcaaggtagaagaacttaaaatacagctgaaaaccgcggtggaaaacgaggaatacgaaaaagcagcactgctccgcgacgagataaagggtctggagggtgataaataa

SEQ ID NO: 1941 - DNA, 1173 bp, unclassified Ruminococcaceae
atggataagaaagtaagacttggaattatcggtgtaggtaatatgggctccggtcatgccaagagcgtgacgctcggcaagtgccccgattttgagttggtcgccgtggctgacataaagccggaaagacttgccaaaataaaggagctcaatccgaacgtcacatgctttgatactgctgaggcaatgctcgacagcggaatgatcgacgcctgcatggtctgcgttccgcactattcgcacccgaaatacactatagagtgcatgaagcgcggaatacatgtcatgtgtgaaaagccggcaggcgtttacacaaagcaggtccgcgagatgatggaggagtcaaaaaagcatccggatgtagtgttcggtatgatgttcaatcagcgtacaaactgcatttatcgcaaaatgcgtgagcttgtaaagagcggtgagtacggcaatatacgccgtaccaactggataataaccgactggtaccgtccgcaggcatattatgattcgggcgactggcgtgcaacatggtcgggcgagggcggcggcgtcctgctcaatcagtgcccccaccagctcgatctgtggcagtggatatgcggtatgcccaaaaaggtcgaagctcatcttcagtacggtcgttggcatgatatcgaggtcgaggacgacgtcaccacatatgtagagtatgaaaacggtgctaccggcgtgttcatcacatcgaccggcgacgcgcacggaaccaaccgctttgaaatacagcttgacagagcaaagctcgttgccgaaaacggaaagctctatatgaccgaatatgagatatcagagccggagttttcaaagaccaacaagatccccttcggcaatctccctgcaaagacctttgaggtggagactgacggcaaaaatcctcagcacgttggcgttataaatgcatggggcggcgctattctgcgcggcgaaccgcttgttgccggcggatgcgagggtatatacggtctaactctctcaaatgcgatgcatctgtcatcgtggctcggcaaggaaataactcttccctttgacgaggacatgtactataatgagcttatgaaacgtgttgcgacctcaaagcgcaagaaaagtgtcaatgaggtagtggcagatacaagcaatacctacggtggagtaaaataa

SEQ ID NO: 1942 - DNA, 1794 bp, unclassified Ruminococcaceae
atggctttgccgcaggagttcctgatggagcttaagtataaaaacgacatcgagtcggtcttatcgccttatgttgcgcttaaaagacgcggcagtaaccttgtgggtctttgcccttttcataacgaaaagacgccgtcgttcaccgtttatcccgaaaatgggtcgtactattgctttggctgcggacagggcggagacatcatcacatttataatgaggatagaaaacctcgattatatggacgctgtcagccggcttgccgatcgcgcagggctccgtatgccggaaaacgggcaggacgaccgggaactcaaattaaagaacgacatttatgaagctaaccgcgaggcggcgctgttttaccactcataccttttgagtgagggcggcagggcaggacttgactattttctgtcccgtgggctgacgcctaagaccatacggcatttcggactgggcttcgctccggacgactggcacgcactgcaggatcacctgcgttctaagggcatttccgactatgtgatgcggcaggctgaccttgttgcggtgtcaaacaagaccaacggcagcggcagcaaaacgcagtttacatacgaccggttccgtaaccgtctcatgttcccgataatcaatatccacggcaaggtcataggcttcggcggcagggcaatgccgggcaatgaaaagcagggcggtaagtacataaacacgtccgatacgccggtgtttaaaaagagcaacaacatgtatgccatgaactttgcaaaaaactgctgctcaaagcagatgatacttgtagagggcaatattgatgttataagcctgcatcaggcaggcttctgcaacacggtcgcggcgctcggcacatcgtttaccgaggagcaggcgaggctgctcggcagatacaccaaagaggtagtaataacgcttgacgccgatgcagccggcgaaaaggcgaccgaccgcgcgatgaagatacttgacggcgttggcgttgaggcaagggtgctgagactgcccgaatgcaaggaccctgacgaatacataaaaaagttcggcgctgcgcgcttcggggcactgcttgagggcacggtcagcgatatcgaatacaggctttacaccgcagcaaaggagatcgatcttgactcgcccgacggcaggctgcaatatctcaaaaaagcatgcggcgttttagccgagcttgacgacagcttggctgtggatctttatgccggcaggctttcggaaaaatacggcgtttcaaaggatgtcctgcttaaaaataccgccgatctgcaaaaaaagcaaaggtcaaagaccgcgaagaaacagcttgacaacattataagaccgcgcatggaaagagatgcggtaaaccccgaaaagcagcagcacaggcgtgccgcggcagccgaggaggcggtcatatgcgtgctgataaagcaccctgatctggcatctaaggctgaggaggagctgccgcccgacaacatgcttaccgaatttgaccgcagggtctaccggcgtattctggaaatagaaaacagcggaagcgaatttgatcttatgcttttgggcggagatttcacaccggacgagatcggtgccgtgactcgcatcatgaccggttctgccggaaaggacaatcccgaaagggtgctgtttgacagcataaaggttataaacgaggaacgtgaggcgttatcggaccgcaatattgacagcctgccggatgatgaatgggcagaaaagctaaaaaaactgacagacagcaaaaaaaagagataa

SEQ ID NO: 1943 - DNA, 852 bp, unclassified Ruminococcaceae
atgataaaaatgaaaaagatacttgcacttgtactttcagcagcactcgcagttctggcacttgccggatgcggaagcagcaacagactgaccatagccgttccgagcgacgccaccaacgaggcacgcgcactgctcctgcttgagtcaaagggatacatcacccttaaagagggtgccggcatcactgccaccgtcaaggatatcaaggacaaccccaagaacatcaagttccaggaggttgaagccgcacaggttcccaacgcgctcaaggattgcgactacgctataatcaattcaaactacgcaatttcggcaggactcaatcccgttaaggactcgcttgccatcgaaggctcatcctcggcatacagcaacattttagccgtcaaggaaggcaatgagaacaccgacaagatcaaggcgctcaaagcagcacttgaaagcaagaagatcgcggatttcatcaccgagaaatacgacggcgctgtggtcagcaccgtttcaaatcccggcgacggatttgactcatcggtagattacgataagctcaagggtactacagtcagtgttgccgcttcgccgacaccgcacgccgagattctggctgttgcaagagagatacttgccgagaaggacatcacccttgacattaaggagttcaccgattacgtccagcccaacaaggtcgttgacagtggtgaggtcgatgcaaactacttccagcaccttccctaccttgaggacttcaacaagcagaacggcacaaaggtcgtgtcggtcgccgctatacacgttgagccgatgggtctctacggcggaaagcagtcatcgcttgacgcactcaaataa

SEQ ID NO: 1944 - DNA, 948 bp, unclassified Ruminococcaceae
atgaacagcaatagcggaaacgtcgagcgctcggcgttcatagcggtggtgggcagaccgaatgtcggtaaatcatcgctgttaaacaggataatcgggcagaaaatagctatagtctcaaacaagccgcagaccacgaggacgcgtataatgggcgtgctgacaaaaggcgaggatcagcttgtctacatcgacacgccgggctttcacaagccgaaaaataagctgggcgagagcatgatgcggtcggtgtcggacggcatgtcgggcgtcgacgcggtgaccctcgtagtagaggcggcgccgaagttcggatttgaccctgacaaccttccggcggctgaagtggcgctcatcgaagaatttaaaaagaggaatctgcacgctgtgctcgccgtgaacaagaccgatcttctgaccgacaggacggagctgctgtcggaaatatcggcatacagcaggctgtacgattttgacgcggtggtgccggtctcggcgcaaagcggcgacggcgttgacgagctggttgccgagcagctgaagttttcaaagcctgctccccacttttttgacgacggtgataccactgatcaggcagacagcgtaatggtctgtgaaatgatacgcgaaaagattctgcttttgctggataaggagataccgcacggcacggcggtcgcacttgagcggtttttcgagcgcgacacggcggcaggcgatccgatcatagaggtcgatgcggtcatatactgcgagagagagtcgcacaaaggtattataatcggcaagggcggagcgatgctcaaaaaggtcggcagccttgccagagcggatatagaggaattcttcggctgcaaatgcaacttgaagctgtgggtcaaggttaaagaggactggcgcaaccgtgccggactgatccggtcttttggtctggatcagaagtcgtaa

SEQ ID NO: 1945 - DNA, 1284 bp, unclassified Ruminococcaceae
atgctggacattaaatttgtaagggaaaaccccgaggtagtaaagcagaacatcagaaacaagtttcaggatgagaagctgccgctggtcgatgaagcgatagaatacgacgcaaagaagcgcgaagcgcagcgcgaggctgattcgctgagagcagaccgcaattctatctccaagcagataggcgcattcatggcaaagggcgaaaaggacaaggccgaggaagccaagaaaaaggttggcgaatttgccgcaaagctcgcagagctggagaagcttgaggctgaatatgacgaaaagctgacccgtgtcatgatggtgatacccaacataattgacccgtcggttcctatcggcaaaaacgacaccgaaaatgtcgagatcgagcgcttcggcgagccggtcgtgcctgactttgagatcccctaccacaccgaaataatggaaaagttcggcggcatcgaccttgacagtgcaagaaaggtcgcaggcaacggattttattatctcatgggcgacattgcccgtctccattcggcggtcatcgcatatgcgcgcgactttatgataaaccgcggctttacctactgcgtaccgccctttatgatccgttcaaacgtcgtcacaggcgttatgagctttgccgagatggacgctatgatgtataaaatagagggcgaggacctctaccttatcggcacgagcgagcacagcatgataggcaagtttatcgacaccgtaaatccggaggagagcctgccctacaccctcaccagctattctccctgcttccgcaaggaaaagggcgcgcacggcatcgaggagcgcggtgtttacagaatacaccagtttgaaaagcaggaaatgatagttgtctgcagacctgaggactcaaaaatgtggttcgacaagctgtggaaaaacaccgtcgacctgttccgttcgctcgacatcccggtcagaactcttgagtgctgctcgggcgatcttgccgatctgaaggtaaaatcgcttgacgttgaggcgtggtcgccccgtcagaaaaaatattttgaagtcggctcatgctccaacctttcggacgcacaggcaagacgcctcaagatccgcgtaaagggcaaaaacggcaactactttgcacacaccctcaacaacaccgtcgttgcgccgccgagaatgctcattgcgttccttgaaaacaacctttgcgaggacggcagcgtaaaaatacccgaggcacttcgtccgtacatgggcggcatggaaaagatagttaaaaagtaa

SEQ ID NO: 1946 - DNA, 720 bp, unclassified Ruminococcaceae
atgatagaaaagctgaccgatatgcagtgtctgtccgatctgcccgacagtgctgcggcggcgagaataaaagcggtcgcagccgcttacggcgatggagcctttgtttactgccaacggataaacggcggcataacggcggtgatgggcggcatgtcgcctgccttcctttcggtatgtttattaaaagaagccgatataccggagcttgtctcatttttcaggatgttcgggacagaggtcttttgcggcgaagccgacgcggctgatttaggcagtgaaaatgcgagatttgatgagcttatgctgtatagcggcagcttttcattgccgcagccgtcgcacgggaaaatatatgacctttacgccgctttgcaaaaaggctccgacggggatatagagctgccaaagcaggatcttttttataccgacatgtgcataagatacaatcacggtgctgcggagtatgcgctgcttccggatgcggcggcggtatgcggatttatgaccgataaagtatctcttatcaccggtgtcgcggtcgactgcggctcacgccggaaagggtgcggcagggcggcactgctgtcgctgatagcagcgataaggcttaaatatccagacacaaaaatttatgccgcagcacacattagtgccgttgggttttacaaaaaatgcggtttcaagagcagcggcagggtagcacttttaaagtattga

SEQ ID NO: 1947 - DNA, 1074 bp, unclassified Ruminococcaceae
gtgaaaaattttttaaaatttactattgactttggcggtttaaagcgctataatctcatcataaaaggatatactattaaaaaagtcctttacggaggtagatttatgaaaaaaacgatgacaagaattttggcagccgttatgtgtattgcgatggctgctgcattttcagcctgcggcagctccaaatccaaggacacctataccgtgggtatatgcgaatttatgagacacgatgcacttgatgccgcgaccaaaggcttcaaggatgcacttaccgaaaggcttggcgacaaggtcaaatttgacgttgcaaacgcatcgggtgatgctaccgcctgttctacgatagtcaacagctttgtttcaaagaaggttgatcttataatggcaaacgctacgccgtcccttgcggctgcagcgtctgcgactacaaccattccgatactcggaacatcggtcaccgaatacggtgttgcactgaatattaaaaacttcagcggtacggtcggcggcaacatctccggcacatctgaccttgctccgcttgagaagcaggctgacatgctgcttgaactggtgcccaacgctaaaaatgtaggactgctttattgctcgggtgagcccaattctctctatcaggttaaggtcgtaaaggcatatcttgaaggcaagggaattacctgcaaggaattcccgtttgccgattcaaacgacctcgcttcggtcactgctgccgccaaggatttcagcgatgcaatctatgttccgaccgataataccgccgccgcgtcgaccggtattatagacggaatatgccgtcctgccaagattccggtcatcgccggtgagtcgggcatatgtgcaggctgcggtattgccacgctttctataagctactatgagataggccgcaagaccggcgaaatggctgccgaaatactagcaaacggcgctgatatttcaaagatgcccattcagtatgacgaaaactacaagaagatgtacaacaaagagatctgtgacgaattaggcatcacaataccggagggctattctctgctcgaaaaataa

SEQ ID NO: 1948 - DNA, 840 bp, unclassified Ruminococcaceae
atggacgagcagaggaaaaaggagcttaaaaaactcgcgctgaaggtaaaaaaacatgttatcgtcggcacgaacagggcaaaatcgggtcacccgggcggatcgctttcatgcgccgagatacttacatacctgtatttcgagaaaatgaatattgatcccaaaaatccgcagatggaaaacagagaccgttttgtgctctcaaagggacatgccgcaccggcactttacggaacgctggcgctcaggggttttttcccggagagcgagatagagctgctccgtaagcccaacgcacttttacagggacatcccgacagaaagcatatccccggcgttgatatgtctaccggatcattgggtcagggaatctccgcagcagccggaatggcgctttcgtcaaagcacttcggcggaaactggcgcgtgtacagcataataggcgacggcgaatcggaggaaggacaggtctgggaagcagcaatgtttgccggaaacaagaagcttgacaaccttaccgtgtttgtagaccttaacaatcttcagatcgatggaacgctcgaggaggtaaactctccgctgccgctcgacaaaaagttcgaagccttcggctggaatgttatcgtcataaacggtcacgattttgatgagatcgaggcagccgttgcggcagccgaaaactgcaagggcagacctaccgccataatcgcaaacaccgtaaagggcaaggatgtttcgtatatggaaaacgccgtcgaatggcacggcagcgccccgaatgatgaactggctgaaaaggcactggctgagctcgacgctaagatagcccaacttgactga

SEQ ID NO: 1949 - DNA, 765 bp, unclassified Ruminococcaceae
atgccggaatttcttgatctcaaccgtttgccggagtactcacattcatcgttcaggtattttgaaaagcacgaaaagcatataacaagggtttgcctgcaagatgtgctggtaatgatatttgacgggactttgcgcttttatgagaacggtgtgccggttgaggtgcctaagggcagcttttatattcaaaagaaggggataccgtacgacggtgtcgttgaaagcgacgaaccgcagtattactacatacattttctcggtaatttcaacatggacgacggcttgccgatttcgggaccggctgacttcacagagctctttccgctttttagagagcttgaccgtgcgaggttcacaaaggcgtcaagggttgaaataaacggtgccttttacagcatactgtcaagtcttaaaaaaggtgcgcaaagacccgaaaaaaacgctgtggcggcaaaaatcgtttcatacgccaccgaggacataagcagaccgctgtcgcttgatcttatagcggcaaaggccgggtattgcaaaaatcaagttatcaatctgttcaagcaggaaaccggaatgactccgcatgcgtatatcacgcacataaggcttgatactgcatcgcgccttcttgtcagcaccgatatgtcggtcgaaaagataagctctgaatgtggtttcggaagttatgtaaatttctacaaggcgttcatcaagaaatataaactctcgccgcttgactggagagaaaaacacatgggagaataa

SEQ ID NO: 1950 - DNA, 573 bp, unclassified Ruminococcaceae
ttgcctaattttacaaaagcagcaataaagcagtcgtttctaaagctgcttgacgagcgtccgctcggcaagataagcgttaaggatatagttgaggactgcggtatcaaccgcaattcattttattatcattatcaggatgttccggcacttataagggagataataaccgatgaagccgcagcgctcatcgcgaagtatccgaccattgagtccatggagcagtgcttttcagccgccattgaatttgcgctcaaaaacaagcgcgcggttatgcatatttacaattccgtgaacagggacgtttacgaatattatctcaacagtatatgcgatcacgttataaacgcgtattttgacacgctgctgtcgggcaggacaatagacgaggatgaccgtcgggtcattgttacggcgtacaggtgcgagtcgttcggtatgataaccgaatggataggcagcggaatgaaggatgaccttgtaaaggatttttatcgcatatgtgagcttcgccgcggctcgcttgaggaaatgataaaaaggagcatagagtctccgccccgggacaagtga

SEQ ID NO: 1951 - DNA, 2256 bp, Eubacterium rectale
atggatagaaatatagataacaatgtagacaacaatataattcagaccgaatattcggagctgatgcagaaatcatatattgactatgcgatgagtgtcattatagcaagagccctgccggatgtgcgcgatgggcttaagcctgtacaaaggcgtacactttatgatatgcatgagctgggcatcaggtacgacaagccatatagaaagagtgcgcgtatagtcggtgatacaatgggtaaatatcatccgcacggcgattcatcaatctatgatgcgatggttgttttggcacaggacttcaaaaagggcatgccgcttatcgatggacacggtaattttggttcaatcgaaggagacggagccgctgccatgcgttatactgaggcaagacttcaaaaaatcacacaggaagcatatcttgctgatctagacaaaaatgtggttgatttcattccaaactacgacgagacagaaaaagagccagaggtgcttccggtcaaggtgccgaatcttttgataaatggagctgagggtatagcagtcggcatggcgacaagcattccgccacacaattttggcgaggtggtggacggtgtgattgcttatatgaaaaatcctgatatcaccactgccgagatgatgcagtatataaaggggcctgattttccgacaggaggcattgttgcaaatcaggatgatcttgcagcaatatatgagaccggacagggaaagataaaaatccgtggaagaatcgaaatagagaagggcaaggcaggaaaggacaagcttgtcattacggaaatcccatacacaatgattggtgccaatataggaaaattcttaaatgatgtctattcacttgtcgagtcaaaagcgacaacggatattgtggatataaccaaccagtcatcgaaagagggaataagaattgtcttagagctaaaaaaaggtgctgatgttgaggcacttaagaaccttttgtataaaaagacaaagctggaggacactttcggtgtaaatatgctggccgtcgcaaatggaagacctgagacgcttggtcttgtaccaatcataaggcatcatgtcaatttccagtatgagattgcaaaaagaaagtatgagacacttcttgcaaaggagcaggagaaagaagaaatacagcagggactcataaaggcctgtaacgtgatagatctgattattgaaatattaagaggaagccgtgaccagaaaatggcaaaggcatgtctcataaacggagagacagaggggattaaattcaagtcaaaggcttcagaagccatggcagcccagctttgctttactgagcgtcaggcagctgctatccttgaaatgcgtctgtacaagctgattggactcgaaattgaggctctgattaaggagcacgaggagaccagggcaaagattgcagagtacagcgatattttagagcatcgctcatccatggcaaaggtcattatgaaggagcttaaagcgttccgcaaggagtatgcaagggacagacgcacagaacttgataatctcgaggaagctgttgtggtcaaaaaagagcttgaggtatcggatgtagtgctgcttatggaccgcttcggctatgtgaagacagtagatacttcaacctatgatagaaacaaagatacagctgacgcagagaacaagctgatattaaaggtcaaaaatatagataagctgtgcattttcacaaacaacggaaacatgcatcttgtcaaggtgttagacctgccttacggcaaattccgtgacaagggcacacctattgacaatgtaagcaactatgacagcagtaaggaagatatagtatttatagcacctcttatggatgttgaaaagcacaagcttatatttggaacgaagtcagccatgataaagctcgtggatggtgctgagtttgtggtgacacgaaagacttcgcaggccacaaagctcatggatgatgatgagctgttgtttgttgacatgctttcagagaatgctacaatggtaatgcgttcaaagaaggaaatgtttcttcgaatcgactgtggcactattcctgaaaagaaaaaggcagcagtaggtgtcaggggaatgaggcttgacagagaggatgagcttactgacatttatctgctttatgaccaggaggaaaaagaggtcgaggtaaagggtaagcaggtggcgcttcacaggctgcacattgcaaaccgtgacactaagggcgtgaagaaataa

SEQ ID NO: 1952 - DNA, 1545 bp, Eubacterium rectale
ataaatatttatacagaaatgaggaataatatgaaatccattaagaaaaaaccgattatgattttgcttatggcagcattaatggccacattcattgttggcttatgcgcatgcggcaaaagcgacagcaaaaaggtcgcttgtgtggacgatctggagggcgcaaaaataggtgtccagctcggtaccacaggagatatctatgtatctgattatgagaacgacggttcaggcaccaaggtagagagatacaacaagggtgctgatgcagtccaggcattaaaggtcggcaagattgactgcgtagttattgatgagcagccggcacttgcctttgtaaaagaaaacaagggacttaagatactggacgaggagtttaccaacgaggactatgcattctgcctgaaaaagggcaatacagagcttcgcgacaaggtaaacactgcgcttgaaaagctgcagcaggatggaacagttcagagcatcatcgacaactatatcggctctgaggatcaggtgggaaagactccctacgtgaagaaggacattgacaggtcaaacggtacacttaaggtaggaaccaatgcagagttcccaccatatgagtactatgaggacaacaaggtcacaggaattgatatggatatcatgcaggccatagccgatgagcttggcatggatatgcaggtagaggatatgcagtttgactcaatcattgccgctgtatcatcaggcaaggtggatgtcggggcagcaggctttacagtgacagaggacagacagaaaaatgttgattttaccgatacatatatcaccacaaagcaggagattatcgtaaaagacagccagtcgggttcttcaatcggtataaaggaaaagctctatgacaattttgtcaaggacaatcgttacatgtatatcgtaaagggtcttggcaatacaatagttatcacaatatttgccgtaatgcttggtattgtgctgggatttttaattgcgatagtcagaaccagccatgacagaaatggcggtcttgccatattaaacggaatttgcaaggcatacctgaccatcatcaggggaacacctgtcatgatacagcttcttattatatactatgtagtgcttgcatctgtgaccaacaagatacttgtagcagtcattgctttcggcctcaactcagctgcatatgtggcagagattgtgcgttcaggaatcatgtctgtagatataggacagtttgaggcaggacgaagcttaggactcaattacagacagaccatgaagcttgttatcataccgcaggctgtcaaaaatatacttccggcgctgcttaacgagtttatcagcctcctaaaagagacatcgatcagtggttatattggtatgatggatctgacaaagggtggagatatcatacgaagcaacacatacgaggcatttataccgcttattgctgtagcccttatttatctggttatagtgatgcttttaagccacggagtaagcaaacttgagaggagactgagaagcaatgaaagataa

SEQ ID NO: 1953 - DNA, 4614 bp, Eubacterium rectale
aatgattcacttcttaataagttatccgttaacaaatttacactaggaaaggaagaacctatgagtaaacaatggaatgaaagcacagccacagctaagggattatatgatcctcgctacgagcatgataactgtggaattggtgcagtagtaaatatcaaaggtatcaaaacacatgagacagtcgagaatgctttaaagattgttgagaacttaaagcacagagccggaaaagacgctgatggtaagacgggagacggtgtcggcatcctgcttcagatttctcataagttttttaagaaggttacaaagccacttggaatagatcttggagacgaaagagattacggtgtgggaatgtttttcttccctaatgatgagttcaagactattcaggcaaagaagatgcttgaggttatcgtggagaaggaaggccttgaatttctcggatggagagaagtgcctacagagcctgataagctttctaaaaaagccagagattgtatgccatgcatcatgcagtgctttgtaaaaagacctgaggatgttgagagaggacttgagtttgacagaaagctgtatgttgcaagacgtgttttcgagcagtcaaacgacaatacctatgtggtttccttctcaagcagaacaatcgtatataagggaatgttccttgtagagcagctcagacagttcttcatggatttacaggatcctgattatgagtcagcaatcgccacagtacattcaagattctctacaaatacaaacccaagctgggagagatctcatccaaacagatttatcgtacacaatggtgagattaatactattcttggaaactctgacaagatgtcagcacgtgaggagaacatggagtctcctaagcttaaaaaagagttccagaaggttctgccggttatcaatgcggcaggatctgattcagcaatgcttgataatgcgcttgaattcctggtaatgagtggtatggagcttccacttgccgttatgataatgattcctgagccatgggcaaacaattcaatcatgacccagaagaagaaggatttctaccagtattacgctacaatgatggagccatgggatggtccggcttcaatcgtattctcagatggtgatctggtgggagcagtgcttgacagaaacggacttcgtccatcacgttactatgtgacagatgatgattatcttattctttcatctgaggtcggagtacttgagattgaccctacaaagattgtgaaaaaggatcgtctccgtccgggaaagatgctccttgtggatactgtcgcaggaaaaatcatagatgatgatgagctcaaggagagatatgcagacaagcagccttatggtgagtggattgacagatacatggtaaatcttaaggatttaaagattcctaaccagagagtacctgagtatacaaaggaagagcgccagagaatgcagagagccttcggttacacatatgagtcactcaaggattcaatccttccgatggctaaaaatggtgttgagggcacagctgcaatgggtactgatacaccgcttgcagctttatcaggtaacagggagccgttattcaactactttaagcagcgcttcgcacaggtaacaaacccgcctatcgattcaatccgtgaggaggtagttacatcaaccacactctatatcggtgaggccggaaacgtgcttgaggagaagccggaaaactgccgtgtacttaagattaacaacccaatccttacaaacaccgaccttatgaagattaagaatttaaaggccgatggctttaaggtagaggttttacctattatatattacaagaacacaagtcttgagaaagcagtagacagactttatatagaggctgaccgtgcatacagggacggagccaacattattatcctctcagacaggggtgttgatgagaaccacgttgcaattccttcactgcttgcagttgctgcattgcagcagtatcttgtaaagacaaaaaagagaacatcgctttcgctcattcttgagtcaggagagccgagagaggttcatcattttgctacactgcttggctttggtgcaagtgcaatcaacccttatctggcacaggatacagttaagcagcttgttgacgagcatatgcttgacaaggattattatgcagcaatcgatgattacaaccatgcaatcatcacaggtatcgtaaaaattgcagcaaagatgggtatttcaaccatccagtcatatcagggctcaaagatttttgaggcaatcggtattgacaagagtgttattgataagtatttcacaaatacagtaagccgtatcggtggaattacattacaggatatcgagaacgatgtgaatgagcttcactctgcggcctacgatccgctcggacttgagacagatgttacacttgacagcaagggcagacacaagatgagaagcggagctgatgaccatctgtacaatccggctacaatccatcttctccagcagtcgacacagcgcggtgactacaatctgttcaagcagtacacagcacttgtggacgaggaagagaaaaatacaaatatccgtggacttatggatttcaactatcctaagaagggtgtcaagctcgaggaggttgagagcgttgactcaattgtgacacgtttcaagacaggtgctatgtcatacggatctatttccaaggaagcacatgagacacttgcaattgccatgaaccatctgcacggaaaatcaaataccggtgagggtggagaggacaaggatcgtctcacaatcggaaaagacggaaagaaccgctgttcagcaatcaagcaggttgcttcaggacgttttggtgtcacaagcagatacctaacaagcgcacaggagattcagattaagatggcacagggtgctaagccgggtgagggcggacacctacctggaaagaaggtttatccttggattgcaaagacaagactttcaacaccgggtgttgcactcatctctccaccaccacaccacgatatttattctatcgaggatttggagcagcttatattcgacttaaagaatgcaaacagagatgcaagaatctcagtcaagctcgtttctgaggccggtgtaggaactgttgcggcaggcgttgcaaaggccggagcacaggtagtgcttatctcaggctacgacggaggaacaggagccgcacctagcagctcaatccacaatgcgggtcttccatgggagcttggacttgcagagacacaccagactcttcttatgaatggtcttagaaataaagtaagaattgagacagacggtaagctcatgagtggccgtgatgtagcaatagcagcgtgtcttggagcagaggaattcggctttgcgacagctccgcttgtaacaatgggctgcgtaatgatgagggtatgtaacttagatacatgtccggcaggaattgctacacaaaaccctgagcttcgtaagcgctttgcaggaaagccggagtacgttgagaacttcatgcgtttcatcgctgaagagcttcgtgagtatatggcaaagcttggcgtaaagacagtggatgagctcgttggacgtggagatctcttaaagaagcgtgataacctaagcgagagacagtcaaagattgaccttgactgtatacttaataatccgtttgacggcaaaaagcagaaggttatatttgatcctaagcaggtatatgactttgagctttcaaagacaaaggatatgaccgagatcatgacacagcttaagagtgcacttgagagcggacaaaagcgcgcgattgagattgaggtaacaaatacaaacagatctctcggaacaatatttggttctgagattacaaagaaatatgacgatacgctggatgaagacacatttgttatcaagtgtaacggtgcaggcggacagagctttggagcatttatccctaagggacttacacttgagcttgtcggagattcaaatgattacttcggaaagggtctttcaggtggaaagctcatcgtatatccacctgcaggagtcaagtttgagaaggatgataatatcatcatcggaaacgtggcactttacggagctaccagcggtaaagccttcataaacggtgttgccggtgagcgtttctgcgtaagaaattccggtgcaacagcagtagttgagggtgtcggtgatcatggctgtgagtacatgacaggtggccgcgtagttatccttggaaagaccggaaaaaactttgcagcaggtatgagcggtggaatagcatatgtgcttgatgaggacaatgacctttacatgagaaccaacaaacagatggtatttactgaggaggtctcaaacaagtatgatgtattagagcttaaggaaatgataaaagagcatgtaacacttacaaactcagaaaagggtaaggaaatccttgagcatttcagtgagtatcttcctaagttcaagaaggttattccttacgattacaaccgtatgcagatggctattgtacagatggaagaaaagggtcttaacgcagagcaggcacagattgaggcattttatgccagcacaagaggctaa

SEQ ID NO: 1954 - DNA, 2166 bp, Eubacterium rectale
atgagcgtacatgtattgtttagtagtttcggaagaggaatacacttctgcaaaagaattttaaggagaattaatatgtacaaaagttattcaatggaacttgccggcaggactcttactgtagatatcggaagagtagcagctcaggcaaacggagctgtttttatcaagtatggtgatacaacagtcctttcaacagctacagcatctgacaagccacgtgacggtgtggatttcttcccactcagcgttgagttcgaggagaagatgtactctgtaggaaaaattccgggtggttttaacaagcgtgagggaaaggcatctgagaacgccatccttacagatcgtgtaattgaccgtcctatgagacctcttttcccaaaggattacagaaatgatgttacattaaacaaccttgttatgtcagtggatcctgagtgccgtcctgagatagttgccatgatcggtacagctttagctgttcacatctcagatattccgtttgacggaccatgtgccatgacacagatgggacttgttgatggtgagtttatcgtaaacccttcacagaagcagtgggatgagggcgatttacagctcacagttgcttctacaaaggaaaaggtcatcatgattgaagcaggagccaatgagattcctgaggatcagatgattgaggcaatctacaagtgccacgatatcaaccagacagttatcgcattcatggatcagatccgtgatgagattggcaagccaaagcatgagtatgagagctgtgctattcctgagcagatgttcgaggatatcaagaaaattgttactcctgagcagatggaggaggcagtattcacagatgagaagcagaagcgtgaggaaaatataagagctatcacagagcagttagaggaagccttcgctgacaatgaggagtaccttgcagtacttggtgaggctatttaccagtatcagaagaagactgtcagaaagatgattttaaaggatcataagcgtccggacggccgtgcaatcaaccagatcagaccactcgcagcagaggttgatttgattcctagagttcacggatctgcaatgtttacccgtggacagacacagatttgtgatgttgtaacacttgctcctttatcagagattcagaaaatcgacggacttgatgctaatatcacaacaaagagatatatgcatcactataacttccctgcatactctgtaggagagacaaaggtatcacgtggaccgggacgtcgtgagattggacacggagcacttgctgagaaggcacttgttcctgtacttccaagcattgaggagttcccatatactatccgtgccgtatctgagacatttgagtcaaacggctctacatcaatggcttcaacatgtgcatcatgtatgtcacttatggctgcaggtgttccgatcaaggctatggttgccggaatctcatgcggacttgtaacaggcgatacagatgatgatttccttgtacttacagatatccagggtcttgaggatttcttcggagatatggatttcaaggtgacaggtacacataagggtattacagctatccagatggatatcaagattcacggacttacaagacctatcgttgaggaggcaatcgcgagaacacgtgaggcacgtctctacatcatggatgaggtcatgagcaaggcaatcgctgagcctagaaaagaagtaaatgagtgggctccaaagattgagcagattacaatcgatccatcaaagattggtgatgttgtcggacagaagggtaagacaatcaacgagattatcgacagaaccggtgtcaagatcgatatcacagatgatggcgctgtttcagtttgcggaacagataaagagatgattgcaaaggcaatcgacatgattaagattatcacaactgattttgagcagggacagatccttgagggaacagttgtaagcatcaaggagttcggtgctttcatcgaatttgctcctggcaaagagggaatggttcacatttctaagattgcaaaagagagaatcaacagagtagaggatgtactcacacttggagacaaggtaaaggttgtttgccttggcaaggacaagatgggaagaatcagtttctctatgaaggatgtaaaagaggattaa

SEQ ID NO: 1955 - DNA, 1065 bp, Eubacterium rectale
ataaagatgaaagataatatgaagagagctcctttctccacacagattgaccttagcaagttcgatatgaaggattttgccaaggcatcagatgaagagaaacgccagcaggatgttatgggtgagtcaactaccttctttaaggatggtcttaagagactccgcaaaaatccactggctatgggttctattatagttttggttttacttattttggttattcttctggcaccaaagattgtgccttacggctatgcagatatcgttaagggtgcacagaacttaggacctttccagtacagcgatgctgagcaggcacagattgatgcaggtgagaagctgttcccgcacatttttggcacagatgagctcggaagagactattttatccgtgttgtttacggagctcgtgtatcgctgggagtcggtgtgtttgcatcactgcttgtgcttataatcggtatcatttacggttccgtatcaggcttctgcggtggcaaggtagatatggttatgatgagaatagtagatatcatttattcattgccggatatgctgctcatcattttactcgcagttgtattaaatgaggtgctaacacctgtaataaagggtacagtgctttcaaagctcggtgtcaacatgattgcacttttcatagtgtttggattgctttactgggtaggaatggcaagacttataagaggtcagattcttaccatcaagcagaatgagtacattctcgcagcaaagtgtatcggaacatcatcagcccgcactatcagaaaacacattttaccgaactgtctgtcagtaatcatcattactacagcgcttcagataccatcagccatctttactgagagttatctgtcatttatcggacttggtgtttcggctcctatgccttcacttggttcgttggcaaatacagcgcgtggcggactccagagctacccattgcgtcttatttttccggcgcttacgatttgtatcattgttcttactttgaatcttatcggtgacggcttaagagatgcatttgaccctaaattatcgaaatag

SEQ ID NO: 1956 - DNA, 2088 bp, Eubacterium rectale
atgttttcaggcggaaagaatgtgggtggaaccacggtaacaaagcttatcgtccccgatgtcgcagcaatgcggtgtcggggattttttattaaaaataaaggagagataaccatgaagataacattgaaggatggctcatcaaaagagtacagtgaagcaaaaagcgtatatgaaatcgcaaaagatataagcgagggacttgcaagagcagcctgcgcaggagaggttgacggagaaattgttgacttaagaacagttcttgacaaggactgcacacttaatataatcacagcaagtgatgaggaaggacttcgtgtcatcagacatacagcatcacacgtgctggcacaggcagttaagaatctgttcccggatgcaaaaatcacaatcggaccggcaattgatgacggtttctactatgatttcgattcacagccattctcaagagaggatctcgatgcacttgaggcagagatgaagaaaattatcaaacagggtcatgagataacaagatttacactccctagagaggaagcaatcaaattcatgaaggaaaaggatgagccatacaaggtagagcttatcgaggagcttcctgagggtgaggagatttcattctatgaccagggtggatttgtagatttatgtgcaggaccacatcttatgagcacaaagggagtaaaggctttcaagctcacagcatcatcaatggcatactggagaggtgattcaaacaaggcaagactccatcgtatctacggaacagcctacaataagaaagaggatttaaaggcacatcttgagagaatggaggaggctaagaagcgtgatcacaataagcttggccgtgagatggagcttttcacaacagtagatgtaatcggacagggacttccgcttatgatgccaaagggcacaaagatgattatgaagctgcagagatggattgaggaccttgaggataaggagtggggctatgtgcgtacaaagacaccactcatggcaaaatcagacctgtacaagatttcaggacactgggatcattatcttgacggcatgtttgttctcggagatcctgagaaggacggcgaggaagaggttatggcacttcgtccgatgacatgtccgttccagtattatgtatacaaggcaaagcagcactcatacagagatctgccttacagaatgggtgagacttccacattgtttagaaacgaggattcgggagagatgcacggactgacacgtgtcagacagtttactatctcagaggggcacaatgttatccgtcctgaccagtgtgaggaggagctcaaggcatgcttcaatcttaacagatatgtccttaaggtgctgggactcgagaatgatgtgacataccgtctttcaaaatgggatccaaagaacacagaaaagtatttaggagatgatgagtactggaactcaacacaggaggttcttcgtaacatccttattgaggaaaatgttccttttgttgaggccgacggcgaggctgcattctacggaccaaagattgatatccaggccaagaacgtatacggtaaagaggataccatggtaacaatacagctcgactgtgctattgctgagaattttgatctgtactatattgatcaaaacggcgataaaatccgtccatacatcatccaccgtacatcactcggctgctatgagcgtacacttgcatggcttatcgagcactacgctggcaagttccctacatggctctgccctgagcaggttagagtgcttcctatctcagagaagtatgctgattatgctaaaaaggtagcagatgagcttaagcgcaatgatgtcgatgtgacagttgacaacagagctgagaagatcggatacaagatcagagaggctcgtatggataagcttccatatatgcttgttgtcggagctgacgaggaggcagacggcacagtatctgtaagaagccgttttgaaggaaatgagggtgttaagccactttcagatttcatcgaccagatttgcaaggaaatccgtacaaaggaaatcagagtggagcttccggaagaggaaaaacacagataa

SEQ ID NO: 1957 - DNA, 1761 bp, Eubacterium rectale
atggcaaagtggtatgttagtgcgaagaaggctgattttgcggcaatcggagcgaagtttggaatagatcaggtgacggcgcggataatcagaaacagaggtgttataggagatgacgcggtaaatgaatttttaaacggcaaaatctcagacattgcagatccagctcttttaaaggatggtcagaggctggttgacattcttgcccaaaagatagctgacaaggccaaaatcaggataatcggtgactatgacatagacggagtgatgtctacatatattcttgtgaaggcacttaaaagagccggtgcatgtgtggattatatgattcccgacagagtgaaggatggctatggtttgaatgtgcatctgattgacaaggcatatgaggacgggatagacactgtggtcacctgtgacaacggaattgcagcgattgaggaaatcgcccatgcaaaggagcttggaatgacggttctcgtaacagaccaccatgcagtgccttttgaagatataaagggtataaagatttacaaggagagcaaagcagatgccgttgtaaatccgcatcagatagagtgcagctatccgtacaaggagctttgcggagcagctgttgcctggaaaattgtcatattgttatatagaaaaattggcatagatgagaaagaggccatggattttatagagaatgtggcatttgcaacagtcggtgatgtcatgccgctgacgggtgaaaaccgtatactcgtaaaggccggtttaaagagtattcatcatacgacaaatatcggcatgaaagccctgcttgaatgttgtaatatagaggctgaaaatgtagatgcatatcattttggatttgttcttggaccatgtgtcaatgcgacaggccgtctggatacagccaaaagagcacttgagctgtttttatgtgacaggcaggaggatgccatgcgcatcgcatcagagcttgtagcactcaatgatgacagaaaggaaatgactgcaaagggcgtggaaaccgcagttgagatatatgagagggacaattacgaaaaagacagggtgcttgtcatatatctgccggatgtgcatgagagcatagctggaatcatagcaggccgtatcagggagagatacaataagccaacctttatactcacaaagagtgaggacggagtaaagggctcaggccgctcgatagaggagtactccatgtatgaggaaatgtgcaaatgcagtgagctgttcacgaagtttggtggccatccgatggctgcaggactttcactgccacaagaaaatgttgagccattccgtcagaaaataaatgagtatgcatcgcttactgacgatgacctcgtgcctaaaatacatatagatgtgccgatgccggtggattatgtatcaatgagactggtgtctgagttttcagtactggcaccgtttggaaaggacaatccaaagcctgtttttgcagacaaaaatctacgtgtgagccgcatgtggatagttggtaaaaacaacaatgtgcttaggctttctttgatatcctcatatggcacgccaatcaatgcaatttattttggtgatatagaaagcttttttgattatatcaggcaaagatttggtacagatgcgcttgaagctgcacaaagaggaaggttcaataatatagtgctgtccgtagtatattcaccaaagataaatgtattcagggaaaatgagtcactgcagtttgaaatacagtattataagtga

SEQ ID NO: 1958 - DNA, 1386 bp, Eubacterium rectale
attagtttattttttaacaaagtagaggtgaaaagaatgtcaaacacattattaatgttgtgtatcccatttgcgggcttattactgtgcatagcagttatgccgcttgtgaagcctgaatggtgggagaagcatcaagctcatgcagttatcttatggtcactgctttttgccattccgttcgcgctgttctatggagcaccaaaagccgtagagacggtactggagtgtctgataggcgactatctgacctttatcgtgctgctctttggactgttctgcgtagccggaaatatcaagctggagggaagtctggtcggcaacccaaaggtaaacgttatcatgcttgctgttggaacttttttttcaagctgtataggaactacaggagccagtatgctttttgtaaggccgattatacagatgaactcatggagaaaaaacaagcgtcacatcatggtatttttcatttttcttgtgtcaaatatcggaggatgtcttacacctatcggagatccgccactgctcatgggattttcaagaggagtatcgttcttctggagcatgaggctgtttccggttctcgtattaaatatgatactgcttcttaccatattttatcatttggacaagaaggcctaccagaaggatatcactaagggacttatgcctgaggtgaaggaaaatgagcccctcatcaggataaagggtgcccacaactttttatatatcgtaatgattgtcatagctgttatactaagcggtgtgcttcctaagctttctgcattccagaacgctgcaggagaggttatcggtattccgatattcagggaggttacactcactgtgcctgcaattattgagattgctattattctgcttgcagccctgctttccttcaagacaacaccgaaggaggttcgtgtgcagaaccatttcacatggggagcaattcaggaggttgcggtgcttttcatcggaatcttcatcaccatgcagcctgctcttatggtattaaagagtgcaggttcaggtcttggaatcacaaagccgtttgagatgttctgggcaacaggagcactttcaagcttcctcgacaatacaccgacatatctggttttccttactacagcgggagccatgcactttactacaggtgtcgcaaccacactgggagtggtgccggtcaagatgcttatggcaatttcgtgtggcgctgtatttatgggagccaacacatatattggaaatgcaccgaactttatggtcaagtcattatcagacgaaaacggtatcaacatgccatcgttctttggttacatgtggtggtcattgcgttatctgatacctgttttcatcatagatatgatcatattctttttatag

SEQ ID NO: 1959 - DNA, 2532 bp, Eubacterium rectale
tttatgagtaagaaagtgataaagccgatagtacttatagtagtatttattgcagcattaattacattttgcataactacaaacaagggaaataaggatatgaccacgaagcaggcggatgcaacgctgccggttatgtcatttaatctggataaaataaagataaacaccctccatggatatactactgagatggatccgacaaagatgcgcgattgcgttattccaatttcggatgacaggaagctctcattatccatttcaacatatggcatggctgttgacaggatatcatacaagatcagaagcatggatggcaagaggctggtggccgatgacgagatatcttctttttctaataaggataatactattcaggcggacgtaagcatgccgaatgttatggatgaaaatactgagtatcttttggtgtttaccatcacaagcggtcaggataatgtatattattacagcaggattatgcagaccgatggaaaggcagctgcaaaggttgttgagtttgcaaagaagtttcatgatgagacgtttataaaggatgacaaatccttctttacaacatatatggagacaacaaccggtgacagaaatacgcttgcacatgtggatctgacatctacggtgagtcagattacctggggctcaatggccgctgcacagtatacgaatcctgtcatagccctaaaggaaataaacgattcttatgatgtggttacaatagactatgtgatgagctgtgtggacggtaagggtgagactgagtattacaatgtgagagagtatttcaggctgcgccagacggaaagccgtatgtacgtgctcaactatgagagaacggcaaatcagatttttaacagtgaaaacagctttatatcggattctggcagcgtaatgcttggcatcagaagcagtgaggcagagtacagggccaatgaagcaggcagtgtgatatgctttgtccaggagggagatttatactcctatgatatcaacaatggaatgataatcaaggtattcagcttcagggacgctgagggcattgatgagcgtgagaactggaatcatcacgatataaagattgtcagtgtagacgaagcgggcagtattgattttgtggtatacggatatatgaacagaggcacccacgagggagaggtgggaaccggtgtgtaccattatgacggtctggcacatactatagatgaggaagcgtttatcccttctaagacatcatatgaggtgctaaaggctgagatgggcaagatgctttatctcaatgagaagaatgaattctatctcatgatggatgacagtctctataggattaatttaggttcgatgtcagtaaagaaggtggttgagggcttgtctacaggctcttactgcgcatcggagagtaacagatactttgcatgggtggattctgcaaatcagtactcatcaaataccataaaagtaatggatttaaagagtggcaagacttttgaggtcaaaaagggcgacgaccagtatctgcgtccgcttggcttcataggtgaggatttcatatatggacaggcgaatgctgctgatgtggtctctgatgcagccggaaacacaacatttccgatgaatggccttattattcttgatacatctgaccagtcggagcttaagacatataccccttcgggcggctatgtcgagaaaatttctgtggatggatatacggtaacgatagatctgattgcgcaaaacaatggtgtgtacgcagaaatcggtcaggataccattatgaaccgggaggccgattcgaaacagaagatagctcttgatacgagccagtccgatacaaagatgacggtcagcgctattagtatagcaggtggtaaaaaaccggataagctgaagcagctgacagcacagatgactataaattcgcatgatactactgttgatttaaagtttgatgacaatacagtccatttctatgtttatgcaaagggggatgtgatttttgcatctgataacatctcggatgccataaaacaggcaaatgacagcatgggagtggtaattgactcaaaccagcagtatgtatggatgagggcaagaaaaaatgcagtaaatgcatttgcgaatattgcatgtaatgaaaccgataaggatgctgacagtgtcgtgaagtcagtaagtgcaatgcttacctacaatgatgttacggtaagtgtgtctgagctgattggagcaggcagcagtgctgttgatgtgctcaaaaacaacctgccggacaaggaaatcctggatttacagggagtgtcttctgaggatattatcttttatatcagcaagggcaatccggtatttgcgatgacgggaaatacgtcggcagtgcttgtgacaggatactcttcaaatggagctttatatatttataatccggataatggcgcaacaacatcgatgagctatgaggatgctgacagaatgttttataatggtggcttgcattttatcacgtacatgacaaaataa

SEQ ID NO: 1960 - DNA, 1584 bp, Eubacterium rectale
ttggggagggaaaaatctctccccaaaataaagtgtatacagacgacagcaaatatagagttaggagcaggaagtatgggcgataagaataatgaaaacatcttatcgattcgtggcatgagcaagtcatttggacgaaacagggttcttgaccacatcaatttagatgtgaaaaaaggtactgtaatgggtctcatgggggagaacggagccggtaagtcgacaatgatgaaatgtctttttggtacataccagaaggacgagggaactatatatctggacggaaaagaggtaagcttttcgggtcctaaggatgcactggaaaatggaatagcgatggtgcatcaggagttgaaccagtgtcttgagagaaatgtcgtagacaatctgtttctcggaagatatccggtcaattcatttggtatgattgatgaaggacgcatgaaaaaagaagcgtctgaattattcagaaagctgggaatgacagttaatctcgagcagccgatgaaaaatatgtcagtatcacagcgacagatgtgtgagattgcaaaggcaatatcatacaactcaaaggttatagtattggatgagcctacatcatcacttacggtacaggaggttgaaaagctgttccagatgatgaggatgcttcgtgaccagggtatttcacttatctatatttctcacaagatggatgagatttttgagatatgtgatgagatttcggttcttagagatggaaatttggtcatgacaaagagcacaaaagaaacaaatatgaatgaactgattgcagcgatggttggacgagtactggagaacagattccctccggtagacaacaaaccaaaggatgtaatcttgtcaatacagcatctttcgacaaagtacgagccacatctgcaggacatcacatttgatgtgcatgagggggagatatttggactatacggacttgtcggagcaggtcgtacagagcttcttgagacgattttcggaatcaggacaagagctgcgggacgagtatattttaagaaccagcttatgaatttcacctgtgcaaaggaggctatggactatggcttcgcacttatcacagaggaaagaaaagcaaatggacttttccttaagggaaacctcacctttaacacaacaatcgcaaatctcggtgcttataagaatggaccggcactttcagacagcaagatgacaaaggccacctctgatgagataaagattatgcacacaaagtgtatgggaccggaggatatgatttcggctctgtcaggaggaaaccagcagaaggttatctttggtaaatggcttgaaagaggaccgcagatattcatgatggatgagcctacaagaggtatcgatgtaggtgccaaatatgagatttacgagctgataatcaatatggcaaagcagggtaagacagtcattgtagtttcatctgagatgcctgagatccttggtataacaaatcgtatcggagtcatgtcaaacggacgactctcaggaattgtcaatacaaaggaaaccaatcaggaagaactgctgagactcagtgcaaagtacctataa

SEQ ID NO: 1961 - DNA, 2286 bp, Eubacterium rectale
gtgaaattatatgaaaatggtgcttaccttttaaacggtaaggaagtaataattgatggaccggaggctcaggcagctgtcaaaagcaagaccggcatggacatcgataaacagacagctaagcaggagacaattgcttacggtattttaaaggagcacaatacatccggcaatatggacaagcttcagattaagtttgataagcttacatcgcatgatatcacatttgtaggtatcatccagacagcacgagcttcaggacttgagaaattccctatcccgtatgtacttacaaactgtcacaacagcctttgtgcagttggtggaacaatcaatgaggatgaccacatgtttggtctcacatgtgcaaagaagtacggcggaatctatgtaccacctcatcaggcagttatccatcagtttgcacgagagatgcttgccggcggcggaaaaatgatacttggttctgattcacatacacgctatggtgcacttggtactatggcagtcggcgagggtggacctgagcttgttaagcagcttcttgaacagacatatgatattgatatgcctgaggtagtaggcatttacctgacaggagagccaatcaagggcgttggaccacaggatgtcgcacttgcaattatcggagaggtattcggaaacggcttcgtaaagaacaaagttatggagtttgtaggaccgggtgtgtctaatctgagcgttgacttccgtataggtgtcgatgttatgacaacagagactacatgtctttcttctatctggagaacagatgaccaggttaaggaattctttgagattcacggtagggctgaggaccacaaggagcttaatccgggtgaggtggcttactacgacagatttattgagattgacttaagccagatccgcccaatgatagctatgccattccacccaagcaatacctatactatcgatgagctcaatgcaaacctcatggatattctcgatgactgtgagaagagagctgaggtaagctttgacggcaaggtgaagcttgatttaaagagtaaggtaagagacggaaaaatgtatgtagaccagggaatcatcgcaggctgtgcaggcggtggatttgagaatatctgcgatgcggctgacatattaaacggacattcaatcggagcagacgagtttacactgagtgtttacccggcatctactccaatatacatggagcttgtgaaaaacggagctgtagcaaagcttcttgagacaggtgcaatcgtaaagactgctttctgcggaccttgctttggtgcaggagatacacctgccaacaacgcattctctatccgtcattcaacaagaaacttccctaacagagagggttctaaggtacagaacggacagatcagctcagtggcactcatggatgcacgttcaatcgctgcaacagcagcaaacaagggcttccttacatcagcagcggatattgatgtcaactttacaaagccaaaatatttctttgacaagactatatatgagaaccgtgtatttgacagccatggagtggcagatccttcagttgaaatccagttcggaccaaacatcaaggactggccggcaatgagtgcgcttcctgagaatatgctccttaaggtggtttcagagattcatgatcctgttactacaacagatgagctcattccttcaggagagacatcttcatatcgttcaaaccctcttggacttgcagagttcgcactttcaagaaaggatcctgagtatgtaggcagagcaaaggaaatccagaaggcccagaaggctatagagagtggtgagtgcgcaggaaaggctgttcctgaggttgctgaaatcatgggagtagtaaagaaaaaattccctgaggcaagccatgagaatatgggcttcggaagcacaatttttgctgttaagccgggtgacggctcagcaagagagcaggctgccagctgccagaaggtactcggaggctgggcaaatatcgcaaacgagtatgccacaaagagataccgttcaaaccttatcaactggggaatgcttccattcatcatcgatgagggagagcttccgttccacaacctcgactatatcttccttccgggaatcaagaaggaaatcgaggatgcaaagacggagtttgaggcatatgttgtcaaggatggtgaattaaagccatttacactgaagatgggtgagctcacagatgatgaaagagagataatattaaagggatgtctcatcaactataatcgtaaataa

SEQ ID NO: 1962 - DNA, 1320 bp, Eubacterium rectale
atggtaaaggtagtaaagtttggcggcagctcgctcgccagtgcagagcagttcacaaaggttggcgacatcgtaagaagcgatgagtcaagaaaatatgttgtgccgagtgcaccgggaaagagaaattccaaagacacaaaggtaacagatatgctttatgcatgctatgatctggctgagaatgatcaggatttcaaggttatgctcagaaaaatcaaggacagatatgattcaatcataaatggccttcatttaaagctggcacttgatgaggagttcaagattatcgctgagaatttcaaggcaaaggcaggtgcagattatgcagcctctcgtggtgagtacttaaacggaatcatcatggcaaactatctcggatatgagtttatagattcggcaacagtcatcttttttgatgagaatggcaattttgacgcggaaaagacagacaaggtgctctcaaagaagcttgagcagacagaaaaggctgttattccgggcttttacggagcaggacctgacggaaaggtagtcaccttctcaagaggtggttcggatatcactggttccatcgtgtcaaaggcatgtcatgccagcatgtacgagaactggacagatgtttcaggctgtctcgtagctgatcctagaattatcgacaatccacagccaatcaaggttgttacttatagagagctcagagagctttcatatatgggagcatcagtgctccacgaggatgctgttttccctgtaagaaaggcaggcatcccaatcaatatcagaaatacaaacgacccggaagcacctggtactctcatcgttgagagcacatgccaaaagcctgattataccataacaggtatcgccggaaagaagggctttgttgcggtaaatatcgacaaggacaagatgaactcagaggtgggcttctgtagaaaggctctccaggcgtttgaggagaacggtatctctatagagcatatgccatcaggtatcgatactatgacagtattcgtacatcaggcagagtttgagggcaaggagcagcaggttatcagctcaatcagaagacttgctcatcctgatatcattgacctcgagtcagacctcgcgcttatcgctgttgttggccgtggcatgaagtcaaaccgtggtacagccggcaggattttctctgcacttgcacatgccaatatcaatgtgcgcatgattgatcaggggtcatcagaactcaatatcatcatcggtgtaagcaatgatgattttgacaaggcaataaaagccatctacgatatttttgttgtcacacagctgtaa

SEQ ID NO: 1963 - DNA, 1692 bp, Eubacterium rectale
gttacagaaacgaacaggttattaaataggaaaggattgaataaagacaaaatgattagtgcaaacaatattacattaagaattggtaaaaaagctttatttgaggatgtcaacataaaattcacagagggaaactgctacggacttattggtgcaaacggtgccggcaagtctacatttttaaagattctctcaggacagcttgagcctacaagcggtgatatcgcaatcactccgggacagagactgtcattcttacagcaggatcacttcaagtacgatgagtttacagtacttgatacggttatcatgggtaataagcgtctctatgatatcatgaaggagaaggaagccatctatatgaaggaggatttctcagacgaggacggaatccgtgccagcgagcttgaggctgagtttgccgatatggacggctggaatgctgagtcggatgcagctactctcttaaacggtctcggtgtacctactgatgatcactacactctgatggcagatctgccgggtgcagtaaaggtcaaggtgcttctcgctcaggcactgtttggaaatcctgacatactgcttctcgatgagcctaccaaccacttagacctcgatgccatctcatggcttgaggaattcctcatcaatttcgagaatacagtcatcgttgtatcccatgacagatactttctcaacaaggtctgcacgaacatcgccgacatggattacggtaagatccagctctacgcaggaaactatgatttctggtatgaatcaagccagcttattgtccgtcagatgaaggaagcaaacaaaaagaaagaggaaaaaatcaaggagctgcaggaatttatccagcgtttctctgccaatgcctctaaatcaaagcaggctacatcaagaaagcgtgccctcgaaaaaatccagcttgatgaaatacgtccatcaagccgtaaatacccatacattgatttccgtcctgagcgtgaaatcggaaacgatgtgctctttgtcgagggtatttcaaaaaccatcgacggtgtaaaggtacttgacaatatctcattcactgtcaaccacgatgacaaaattgcatttgtcggaggaaacgagcttgcaaaaacaactatgtttaaaatccttgccggagagcttgagcctgacgagggctcatataaatggggtgtcacaaccagccagtcatactttccaaaggacaataccacaatctttgatactgatgagctaatcgtcgactggctcacacagtactcagaaatcaaggacgccacatatgtgcgaggtttccttggccgtatgctctttgccggtgaggatggagtaaagaaaatgcgtgtactctccggaggagaaaaggttcgtgtactgctctcccgcatgatgatcatgggaagcaatgtactcatgttcgatgagcctacagaccacctcgacatggagtcaataacagcattaaacaacggaatgataaaattcccgggagtaatcctctttgcctgccgtgaccaccaggtagtccagacaaccgccaaccgaatcatagaattcctgccaaacggttcaatgatcgacaagatcacaacctacgacgaatatcttgatagcgatgagatggcacgtaagcgtcaggtctactcaatgagcgaggacgatgaaaaagacaactaa

SEQ ID NO: 1964 - DNA, 1341 bp, Eubacterium rectale
atggaacagatgagagaaaaatatgaaagtttgtcggcatttgtgcttaaggatctggcgaaggcaagaggaattaagggcgtttcatcactgaaaaagggacagattattgaaagaatgctcgaggaggatgcaaaagaggctgaggaggctgagaaaaacggtacagccgaggagcgcgccaactcttttaaagatgattatgcagcactcgacagtggagaggaggcagaaggcatacttgaggtaatgccggagggctttggatttatccgctgtgataattatatgccgggagatcatgatatctatgtggcacctgcgcagatacgccgcttcaatttaaagacaggtgatatcgtaaagggtaatatgaaggtgaagtctgagcgtgagaaattccaggctcttttatatctgaccactgtcaacggatatacaccggatgtagcacagaagcgtacaagctttgaggatcttgtgcctatattcccgaatgagagactgcgtctcgagagacccggagcaagtgttgcgatgagggttgtagatctcatctctccaataggaaagggacagcgaggcatgatcgtttcacagcctaaggccggaaagaccacattacttaaagagattgcaaagtctgtcactgtaaacaatcctgagatgcatcttattattctccttattgatgagagaccggaggaggttacagatatcaaggaggctatagagggggacaatgtcgaggtaatctactctacatttgatgaacttcctgagcatcacaagagagtgtcagagatggtaatagagagagcaaagcgccttgtagagcatggtaatgatgtcatgatactccttgacagcataacaaggcttgcaagagcttacaatgtgacagttccaccatcaggccgtacactttcaggaggacttgatcctgtagcgcttcatatgccaaagagatttttcggagcagcacgtaatatgagaaacggcggcagtctgacaatacttgcaacagctcttgttgatactggaagcaagatggatgatgtagtatttgaggagttcaagggaacaggaaacatggagcttgtactcgacagaaagctttccgagaagagaatcttccctgctatagatatagtaaaatcaggaacaaggcgtgaggatctgctccttgatgaggatgagcaggcagcagtcgataatatgcgtaaagccttcaacggtatgcgctctgatgaggctgttgagaacgtactcaacatgtttgcacacacaaagagcaacaaggaatttgttaatcttgtaaagaaaaacagaattttataa

SEQ ID NO: 1965 - DNA, 1488 bp, Eubacterium rectale
atgggagaaaataaaatgaagcttgaaaaattacttgaaagaatggattataaagtattagcaggaagcacggatatagagatttccacactcgtgtatgactcgcgcaaggtggagaaggcatcggtatttgtgtgcatatcgggagctgtgtcagatgcacatgatttcatccctgatgtggtaaagaaaggtgcagcggcagtggttgtcgaaaaagatgtgactcctatcgaaggggtgacatatattaaggtagataatacaaggcttgcacttgcgtgtatgtcagcagcttattttgattatccggctgagaaaataaagactatcggtattacaggtacaaagggtaagaccaccaccacatatatggtaaagtcaattcttgagtcagccggcataaagacaggacttatcggtacaatagagtctatatgtggtgacaagagaattccgtcagcaaataccacacctgagtcatacagagttcaggagctgtttaaggagatggtggatgaaggccttgatgcagttgttatggaagtgtcatcacaggctctcatgcttcacagagtatctggctttacctttgatattggtgtatttacaaatcttgagcctgaccacatcggagagcatgagcacaaggattttgcagactacatgcattgcaagagccttttattcagacagtgcaggcttggtatctttaacggagatgatgagcacttagagggtgttatgaagggacacacatgccaggtggagacttacggctacaagtccacaaataacctggtagcagaaaatgttgagcttaaaaaggagcatggagcactcggcattaaataccatgtatcagggcttttggattttgatgtggaggtcaatgtgccgggcaaattctcagtatacaattcactaacggccattgctatctgccatcatttcaatgtggataaaaaggcaatcggggaggctcttcatcatgtgagtgtaaagggcagaatagagattgttcctgttacaaagagatatacccttatgattgattatgcacacaatgcgatggcacttgaaagccttctcaccactcttaaggagtatgagccgggcagacttgtatgcctgtttggctgtggcggaaacagggcaaagtcacgccgttatgagatgggagaggtgtcatcgagacttgcagaccttactgttgtcacatccgataatccaagagatgaggagcctatggacataatcaatgatattttacagggtgtacacaaggcagatggagagtatgtgacaattcctgaccgtaaggaggctatcagatactgcatggagaatgccaaggatggtgatatcatagtacttgcaggaaagggacatgaggattatcaggagataaagggtgtgaagcatcacatggatgagagagaattaattgctgatataataaaagaaaatcctgacatcagactttaa

SEQ ID NO: 1966 - DNA, 2772 bp, Eubacterium rectale
atgcagttaacaggatcacaggttattatagaatgcttaaaagaacagggtgttgacacagtattcggttatccgggaggagccatccttaatgtctatgacgagctctacaagcatccggagattaagcatgtgctgacctcacatgagcagggagcaagccatgcggccgacggctatgcgagaagcaccggaaaggttggcgtctgtctggctacaagcggaccgggtgcgacaaatctggtcacaggaatttcgacagcatacatggattcgattccaatcgtcgcaatcacatgtaatgtcggagtctcgttacttggaaaggacagctttcaggagatagatattgccggaattacaacgcctgtaaccaaatacagctttattgtaaaggatgtagagaagcttgcagatacaatacgcagagctttcaatatagcaagaaaaggcagaccgggtcctgtacttgtggatattccaaagaatgttacggcagatctggtagagtacaccagacaggaaattaagcttcctgagcgtgagacagaaacaattacagacagtgacattgataatgcaattgaactcataaaagcatccaaaaagccatatatatttgttggaggcggagtggttctctccggagcaagcaaagagcttaaggaatttgtagacaaggtgaatgcacctgtttgcgatacgctcatgggcaagggtgcatatgatggcacaagtgataactacacaggcatgcttggtatgcatggcacaaagacctcaaaccttggagtttcagagtgcgaccttttgattgcgattggtacacgtttttcggacagagtgcttggcaatcctaaaaagtttgcagaccaggccaagatattgcagtttgatgtagacgcagcagagattaataaaaatatccgtgttacatcgagtgttataggcgatgtgaaggaaatacttacacgcatcaacgaaaagctcacgcagcttgaccacaattcatgggttgagcatgtgctggcatatgcaaagacttttcctcttacatatcacaaagagggacttagcggaccatttgttattgaaaaaatctatgaaatgacaaaaggaaatgctataatggttactgaggtcggtcagcatcagatgtgggcagcccagtattacaaatacagtaagccaagaacacttcttacatcaggaggtcttggtaccatgggatacggtcttggtgctgcaattggtgcccagacagcaaatcctgacaggactgtagtcaatattgcaggtgacggatgcttcagaatgaacatgaacgagcttgcaacagcttcaagagaaaagcttcctcttatagaggttataataaacaaccatgtacttggaatggtacgccagtggcagactcttttttacgagaagcattactcggcaaccgtacttgatgatggggtggagtatgtaaagctttcagaagcaatgggagccaccgcacgacgtgttaagacccaggaagaatttgaaaaagcatttgcagatgccttaaagagcaagacaccgtttgtcatcgattgtatcattgattcagatgacaaggtatggcctatggttgcaccgggcaagcctatcaacgagtcttcgatgaagaggactacaatgcgacacaaggaggaaattagagtgagtagagtttacaatttttcagcaggacctgcagttttacctgaggaggtattgcaggaagcagcagcagagatgatggattataagggaagcggaatgtcggttatggagatgagccacagatctaaatggtttgatgacatcatcaaggatgccgagaaagatctccgcgagcttatgaatatacctgacaattacaaggtacttttccttcagggtggtgcttcacagttcttcgctgaggtaccgatgaaccttatgaaaaataaaaaagcaggatacattatcacaggtcagtgggctaaaaaggcgtttgccgaggctaagatttacggagacgccgtagagcttgcttcgtctgcagatgagaccttctcatacatacctgactgttcagatttaccaatcacagatgatatggattatgtatatatttgcgagaacaatactatctacggaacaaagtacaagaagcttcctaacacaaagggaaagaaccttgtagctgatgtttcttcatgcttcttatcagagcctgtagatgtatcaaaatatgctgttatctatggcggagtacagaagaatgtaggacctgccggagttgttatagcaattatcagagaggaccttatcacagatgattgtctaccgggcacaccaactatgctcaagtggaagactcaggccgataacgattctctttacaatacaccaccatgctacggcatctatatctgtggcaaggtattcaaatggctcaagaagatgggcggtctttcagttatgaaggagagaaatgaggagaaggccaagattctctacgatttccttgatcagagcaagctctttaagggaacagtaagaaaagaggacagatcactcatgaatgttccgtttgtaacaggagatgcagagcttgatgccaagtttgtaaaggaggcaactgcagccggatttgtaaaccttaaaggtcaccgtacagttggcggaatgagagcatctatctacaatgctatgccaaaagagggcgttgagaagcttgtagagtttatgaagaagtttgaggaggagaatgcataa

SEQ ID NO: 1967 - DNA, 1293 bp, Eubacterium rectale
attcaatattttaatatagatggaggaaaccaaatggcactgagcaaaaagccggtcaacggcatgaaggatatactacctgcagagatggaaatccgtgattatgtgacaagcgtgatcaaggatacatacagaagcttcggatttacaccgatagagacaccatgcatggagaatatagcaaatctcacaagtaagcagggcggagaaaatgagaagctgatcttcaaggtaatgaagagaggcgagaagctgaatttggagacagcaaaggaagagtctgatgtagtagactttggaatgcgctatgaccttacagtgccactttcaagatattattcaaacaatgccaacaacctgccatcgccgtttaaggcacttcagatgggcagtgtgtggagagcagacagacctcagagaggccgctacagacagtttacacagtgtgatatagatatactcggagagccaagcaatctggcagagatagagctgattacagcaaccactaccacaatctgcagactcggcttcgagaactttgagataagaatcaacgagagaagaatcctaaaggcaatggctgcttacagtggtttcgctgaggaggactacgacagcgtatttatcacactcgataagatggacaagataggagtggaaggcgttgcaagtgagcttgcacaggatggctacccacaggaaaatattgacaaatatcttgatttgttcaagcttttggagcagacaagggatgtcactgagggtgtaaatatactttcagaaaagcttggtgaatatttagacgaagaagtggttacaaatatgacagagatagctactgctgtcaatgccacaaagggagcaaagtttgagctcgtatttgaccctacacttgttcgtggaatgagctactacacaggaactatttttgagatatcaatgcctgagcttggcgcagcttgtggcggtggcggacgatatgacaagatgattggaaagttcaccggaaatgatgtacctgcctgtggtttttcaatcggttttgagagaattatcctgcttctcatggagagcggcttcaagattcctgagagtccaaagaaggtggcttatctggttgagaagaaatatccggcagacaagcttgttgatgtcatgaaccaggcaaaagacgcaagagcaaacggacagcaggtgcttgttgtgcgcatgaacaagaacaagaaattccagaaggagcagcttatgaaagagggctacgaggagtttgttgagttctttaacagatag

SEQ ID NO: 1968 - DNA, 1167 bp, Eubacterium rectale
ataatgtttaattacacatgcttaaacccaatcgcaggagtaggacttgacctgttctctgacgattataaaaaggttgatgatattaaggatgcagatgcagcacttgtaagaagtgccgctatgcatgacatggagcttggtgacaaggtgcttgctgtggcaagagcaggagcaggagtaaacaatattccgcttgacaagtgtgccgagcagggaatcgttgtattcaacacaccgggagccaatgcaaacggtgttaaggagcttgtgtttgccggaatgctttatgcatcaagagatatcgttggaggtatcgactggtgtcttgcaaaccagaacgatgagaatattgcaaagacagccgagaagcagaaaaagaactttgcaggaacagagatttcaggcaagaagctcggtgttatcggacttggagccatcggtgtacttgttgcaaatgctgccgtacatatgggcatggatgtttacggatatgatccatacatctcagtaaatgccgcatggaatctttcaagaagcgttaagcatatcagcaatgttgaggacatctacaagaactgtgatgtcatcacaatccatgtaccgcttcttgattcaacaaagaagatgataaacgctgatgctattgcaatgatgaagccaaccgctatcgtattaaactttgccagagatcttctcgttgacgaagaggctatggtagatgcacttgccaagggaaaggttaagaagtacgtttcagatttccctaacaacacaactgttggagcaaagggctgcatcgtaacacctcatcttggagcatctacagcagagtcagaggacaattgtgcagttatggctgtcaaggagctgagagattacttagagaatggtaatattgttcattcagtcaacttccctgactgcagcatgggtgcatgcacagcttcaggcagagtcggaatccttcacaagaatgttaagggtatgattggacagattacaactgctcttgcagaggctgatatcaatgtatctgatctgacaaacaagggcaagggtgactatgcatattcacttcttgatcttgattcagctattgatgcttctaccgttgagaagctttctgccattgacggagtgctcagagtgagagttattaaatag

SEQ ID NO: 1969 - DNA, 1542 bp, Eubacterium rectale
atgagtaagaaaccggtagtattaatggtacttgatggttacggcttaagtgaccacaaagagggaaatgccatagctatggcaaatacccctgttatggataaattgatggcagagtgtccttttgtaaagggcgcagcttcaggtcttgcagttggacttcctgacggacagatgggaaactctgaggtaggacatatgaatatcggcgcaggccgtatcatatatcaggatcttacaagaatcacaaaggcaattgctgatggtgatttcttcaagaacaaggtattaatttctgcaatcgaaaactgcaagaagaatgactccgatctgcatctttggggacttctttcagatggtggagttcacagccatatcgagcatctttacggacttcttgagctttgcaagaaagagaattttgacagagtatatgtacacgccttccttgatggtcgtgatacacctcctgcatcaggcaaggattatatcgagcagcttctcgccaagatgaaggaaattggtgtaggaaagattgcatctctttcaggacgttactatgcaatggacagagataacaattgggatcgtgtacagaaggcttatgattcactcactaagggtgaaggcgtaaaagctacatgccctgtaaaggctatggaggagtcatacgcaaatgacgttacagatgagttcgtgcttcctacagttatcacaaacgaggatggcacaccggtatctgttgtaaaggacaatgattctgttatcttcttcaacttccgtccggaccgtgcccgtgagatgacaagagcattttgcgatgataagtttactggctttgagcgtccattccttaagacaacatttgtatgcttcaaggattatgacgagtcaattcctaacaagcttatcgcttttgagaaggaagaaatcaagaatacatttggtgagtatcttgcagcaaatggcaagaaacagcttcgtctcgcagagacagagaagtatgcacacgtaaccttcttcttcaacggtggagtagaggagccgaatatcgatgaggcacgtcttcttgtaaacagtcctaaggatgttgcaacatatgacttaaagcctgagatgagcgctcctgaggttggaatggatcttgttgaggctatcaagtcagataagtatgatgttattatcatcaactttgctaaccctgacatggttggtcatacaggtgtgatcccggctgctgtaaaggctgttgagagagtagattcactcgtaggcgatgcagtacaggcaatcaaggatgtggatggagtattattcatctgtgcggaccacggaaacgcagagaagatgattgattatgagacaggaaaacctcatacagctcatacaaccaatcctgttcctttcattcttgtaaacgctgacccttcttacaagcttcgtgagggcggatgtcttgcagatatcgctccaacactgcttgagattatgggacttccacagccaaaagagatgacaggaaagtcacttatcgttaaataa

SEQ ID NO: 1970 - DNA, 1647 bp, Eubacterium rectale
ttgagcttcttacaggaagcaaattcagccgctaatatattatttattccgcgttactatttcgcaattataaacggagatattatgaaccaggacaataacataaatcagtatataaatactagtatagatacaaaaagtcataccggtacaaaattagaaaggtgttctgatattgacgagcataaccatgtatttgatgagcttcatgaggagtgtggtgtgttcggcatgtatgattttgatggaggaaatgtcgcatccactatctattatggtctttttgcgcttcagcacagaggacaggaaagctgtggtattgcagtgagtgatacacacggaccaaagggtaaggtgaccacacacaagggtatgggccttgtaaatgaggtatttactcctgatattttagagcctatgaagggtgatatcggagttggacatgtgcgctattcaacagcaggctcatcaacacgtgagaatgcacagcctctcgtattaaattatgtcaagggcacacttgccatggcacacaacggaaacctcattaacgcaaaggagcttcgcaaggagcttgagtatacaggagcaattttccagaccacaatcgactctgaggttatagcttatcatatcgccagagaacgtcttaactcaaaaacagcggaggaggcggtcagacgtgcctgccagaagcttaagggagcctacgcgcttgttgttgagagcccgagaaagcttattgcagccagagacccatttggttttaagcctctttgcatcggaaagagagacaatgcatatatcgttacatctgagacctgtgcgcttgatacaatcggtgcagagtttgtcagggatatagagccgggagaggttatcactatcactcctgaaaagggcattgagtctgatatgactatggcacttgcccctgaaaaacaggccagatgcgtgtttgaatacatttatttcgcaagacctgacagccatattgatggagtaagcgtgtatggcagccgtatcaaggctggcagattccttgcaatggattcaccggttgaggctgatatcgtgacaggagtaccagagtcaggaaatgccgctgctcttggttattcacttgagtcgggcattccatatggcacagcatttgtcaagaacggttatgtcggcaggacatttatcaagcctaagcagtcaagccgtgaatcaagcgtgcagataaagctcaatgtattaaaggaggctgttaagggcaagagagttgttatgattgatgattcaattgtgcgaggaacaacctcagacagaatagtgcgtatgttaagagaggcgggtgccacagaggtgcatgttcgcatcagttcaccgccattcttatggccttgctatttcggtacagatattcctgcaagagagcagcttatcgcttacaacaggactattgaggatatcagacagattataggtgcagattctttaggctaccttggaattgacagacttcatgagatggtagagggactgccaatctgcatgggctgtttcacaggaaaatatccgatggagccaccgaaggatgatatcagaggcgagtattttgataaagaaatagacctcgagagaaaaatgcttaatcgctaa

SEQ ID NO: 1971 - DNA, 2652 bp, Eubacterium rectale
gaaatattcgtggcagaagtatcaccaatgatgcagcattatctgcagacaaaagaacaatataaggattgtattttattttatcgcttaggagacttctatgagatgttttttgatgatgcgataatggtttcaaaggagcttgagcttacactcaccggcaaaaactgcggacttgaagaaagagctcctatgtgtggagtaccgtttcacgcggcagactcatatatcaacagactcgtatcaaacggtcacaaggtagctatctgtgaacagatggaggatccaaagcaggcaaagggaatcgtaaagcgagaggtaatccgtgttgtgacacctggcacaaacactgatatggcttctttagatgaagcaaaaaacaattacataatgtcgattgtatacactgaggacaaatacggcatagcaacctgtgatgtcacaacaggtgatttttttacgacagaggtggatacggaaagaaagctgttagatgaggtgagcagatttaatccatcggaaatcatatgcaacgaggccttctacatgagcggaatagatgttgacgatatgaaaaacagattatcaattactgtttcagcactcgactcatggtatttttctgatggtcttgcaaatgagacactgctttcacatttccatgtacagacaataaatgctctggggcttgaggattatgagagtggagtcatagctgccggcgccctgttaaagtacctttatgagacgcagatgaactcgctcgacaatatacttgagctttatccgtactcaataggcaaatatatgataatagacagctcatcaagacgtaatttggagcttgtagatacccttcgtgaaaagcaaaagagaggctcactgctttgggtactcgacaagacacgcacggctatgggagcaagactgcttcgcacctatgtcgagcagcctcttatcgaaaaggcagagataataaagcgccagaagcttatcgaagcacttaatgcaaacgaaatcacaagagacgagatcagggaataccttaatcctatttatgaccttgagcgtctcatcacaagaatcacataccagtcagcaaatccgcgcgaccttattgccttcagggattcattaaaaatgcttccaccaataaagcagcagctttcagacataccgtgtgagcttactgatgagattaatgaagagctcgacgagcttaaggatatatatgagcttttactttcatccatcgaggatgagccgcctatctcacagcgtgacggagatatcataaaagctggctacaacgaggaggttgaccgtcttcgagacgcaaaaaccaagggaaagacatggcttgctgagcttgaagccggtgagcgtgaaaaaaccggcatcaaaaacttaagaatcaagtataacaaggtatttggatattaccttgaggtcacaaactccttcaaggatatggttcctgattattatgtgagaaaacagacactcaccaatgcagagcgctacataacaccggagcttaaagagcttgaggataccattcttggagctgaggacagactcacatcacttgagtatgagctgtttcgtgatgtaagaaaacagatttccgacaatgtttcaaggattcagaaaacagccagagctatagcacagattgatgtttttgcttcgcttgcgcttgttgccagtcagaataattactgcaagccaaagataaatgaaagcggaataatagacataaaaaacggacgtcatcctgtagttgaaaaaatgattacaaatgacatgtttatagaaaacgatacatatctggatcagcacaaaaacagaatctcaatcattacagggccaaacatggccggtaaatccacctacatgagacagacagcacttatcgttctcatggcacagattggaagctttgtacctgcacaaactgcaaatatcggtattgtagaccgtatcttcacgcgagtcggtgcatctgacgaccttgcaagcggccagagtacatttatggttgagatgaacgaggtggcaaatatactaagaaatgcaaccgcaaaatccctgctcattctcgatgagattggacgaggcacgagtacatttgacggactaagcatcgcctgggcagttgtagagcacataagtaatccaaagctcctcggtgcaaagacgctttttgcaacccattatcacgagctcaccgagcttgagggcaagcttgacagtgtaaataactattgcatcgctgtaaaggaaaagggcgatgatatagttttcttaagaaaaatcgtaaagggcggagctgacagaagctatggtatacaggttgcaaagcttgcaggtctgcctgattcagtcatagagcgtgccaaggaaatcgcagaacagcttcttgcaaatgatatcacagatactgtaaaaagcatatccgttgacactggccacaagcataaaaaggagcaccttgacgaggttgatatgacacagatttcgcttttcgacacagtgaaggatgatgatataattgacgagcttcgaagcatagacataggcaacatgacaccacttgatgcgttaaacaagctgtatcagctccagaacaaggttaaaaaccgctggtag

SEQ ID NO: 1972 - DNA, 1098 bp, Eubacterium rectale
agtataacacgaaagggcagggtaaagatgaaagcatttttaattcttgaagatggtaatgtatttaccggaaccagcattggttcaacaagggaagtcattagtgagatagtatttaacacatcaatgacaggatatctggaggtacttacagatccttcctatgcaggacaggctgttgtaatgacttatccacttatcggaaattatggaatcacaccggatatggagtcagaaagaccatggccggatggatatatagtaagagagctgtcacgtatgccaagtaatttccgctgcgagggtactatacaggatttcctcgagaaaaacgatattccgggagtggccggcattgatacacgtgcgcttacaaagattctcagggaaaagggtactatgaacggaatgattaccacaaatgagaattacaatctcgatgagattattccaaagctcaaggcatatactacaggcaatgtggttgacaaggtcacatgcactgagaaaaaggttttaaagggccaaggaaagagggttgccctcatggatttcggtgccaaaaacaacatcgccaaatcactcaatgaaagaggctgtgaagttacaatttaccctgcacacacaaccgctgaagagatacttggtgacaatcctgacggaatcatgctctcaaacggacctggagatccaaaggagtgtgtagatattataaaggaaataaagaagctttatgacagcaatgtgccgatttttgcaatctgcctcggacatcagctcatggcacttgcaacaggcgcagatacacacaagatgaagtacggacacagaggtggaaaccatccggttaaggatcttgcaacaggccgtgtttatatttcttcccagaaccatggatatgtggttgacacagataagcttgaccctaatgtggctgagcctgcatttataaatgtcaacgacggcactaatgagggacttaagtatgtgaacaagaatatcttcacagttcagttccatccggaggcatgccctggaccacaggattcagcatatctttttgaccgctttattaacatgatgggaggtaaccagtaa

SEQ ID NO: 1973 - DNA, 1521 bp, Eubacterium rectale
aacaaattagttgaaaaaaatttagaaatagtctattatcatactagcgaaaaattttatttttttatagatggaggatataaaatgagtagtaacaatcaaagcttggcaatgcagcgtattgctaagttagtcgacgagaacagtttcatggaaattggttctcttgtgacagctcgcagtacagattttaaccttactgcagcaaaagctccttcagatggtgttattatcggacacggtctgattgatggaaatcttgtatttatctatagccaggatgcaacagttcttaacggaacaatcggcgagatgcatgcaaagaaaattgcttctgtatatgatatggccatgaaaatgggcgcacctgttatcggatttatcgattgcggtggtatcagacttcaggagtcagttgatgcattagacggatttggtcttatttacgccaaggaagttgcagcaagtggcgttattccacagatttgtggtgtattcggtaattgtggtggcggactttctgtagtaccggctctttgtgatttcgcttatatcgaagagtctaagggcagaatgtttgttaatactcctgatgcaatagagggtaaccgcgttgagaaatgcgatacagcagcagcttcattccagagtgagaacaatggatgtgtagacggaatcggttcagaggatgatattatcgctgatatcagagctcttgtcagcatgcttccactcaacaacgagggagatgtatatacagactcatgtgaggatgatctcaacagagcatgtaacagcatggctgatatgaaggctgatccaagattcctcttatcagagctttctgatgatcatgtattctttgagacaaagaaagactttgccaagaatatggttacaggttttgttaaattaaacggcatgacagtcggtgcagttgcaaactgcagcacagtatatgatgctgagggcaagaaggcagaggagtttgcactttctcttactgcaaagggctgcaacaaggcagctgagtttgtatcattctgtgatgctttctcaattcctgtacttacacttacaaatgtaaacggattcaagaactgcatgtgctctgagaagaagcttgcaaaggctcttgccagaatgacatacgcattctcaagtgcaacatgtccaaaggttaacctgattacaggcgaggcttacggaagcgcatatgttgcaatgaactctaagtcaatcggagctgatatggtttatgcataccctgatgcaaagattggtatgatggattcaaagattgcagctgagattatgtatccgggcgctgatgcaaaggaaattgatgagaaggcagctgattacgagaagcttcagtcttctgtttcatcagcagcagccagaggatatgtagacctcatcattgatccggctgacacaagaaaatatcttgtaggtgcttttgagatgctttacaccaaatatgtagatgcaccagagaagaaacacggaactaaataa

SEQ ID NO: 1974 - DNA, 1332 bp, Eubacterium rectale
ttgatagcattgactttcaacacacacgtttgtataataatctcatcaattcctagtaacacaatagactatgtaagaattaacgagaagaagaaaacaatgagatttaatacaagcttacttcatgccggcgtgacaaaagagacaaatggctctacactgccaccggtatatcagacaagcgccttcgagcaggagagcgcggcagatctggaaaaaatatttgaaaacaaagctccgggctactgttacacaagagttgccaatcctacgattacagcttttgagaacagaataacaaagctcgagggaggaatagcatcggtggcatgcgcatcaggcatggcggcactgatgaataccttcttaaatatactaagcagtggagatgagctcatctcaagcgccagcctctacggtggcacaatagatttgttccatgatcttgaggccttcggcatcacaaccagatatgtcgagaacaacaactggcagcagatagaggacagcatcaatgagcataccagactgatttttgcagagactatcggtaatccctgtctggatgttacagatattgagaagcttgcagagatagcacacgcacatgatataccgcttgtagttgacaataccacatcgacagcttacctgatacaggttttaaagcatggagctgatatcgtggtcaattcatcttccaaatatataaatggaagcagcaatgcaatcagtggtattctgacagactcaggtaagttcaaatgggacaagaacagatatccggggtttgcagattatgtgaagtatggacctatggcatttgtcgcaaagctgagaaacagtcttttcagaaatatgggtgcctgtttagctccggtgaatgcatacttaaatattataggacttgagacactcggtcttagaatggaaagagaatgctctaatgcactcgagcttgcgtcatggatagaaaacaattatcctgacataaaggttaattatccggggctttgtagcagcaaatggcatgaaatagcaaaaaaacagctcacaaacggctatggagcaatccttacaatcagggttggcagcaaggaaaaggcatttaaatttatagacagcctgacgattccatacacactcagcaatatcggagatacaaagacacttgtcattcatccgggttccacaatcagtcttcacagcacagataagcagaaggaggatgcaggagtatttgaggatcttataagagtcagcgtgggtatcgaggatatagatgacctcaaggaggattttgcacaggcttttgcaaatatagctgattaa

SEQ ID NO: 1975 - DNA, 1302 bp, Eubacterium rectale
atgagaactttaaaacttacaaaggattcacagaaaaacatattggagagcctgcttaagagaagccctaacaactatacagagtatgagagcacggtaaatgagattataaacaatgtaaaggaaaaccgtgacaaggctgtttttgaatacacaaagaaatttgataaagcggatgtggatgcatcaaatatccgtgtcacagaggaagaaataaaggaagcatatgagctggttgatgagaagcttcttgccgttataaaaaaagctcttgtaaatatcagaaaatatcacgagaagcagctgcagaactcatggtttacaacagaggacggcatcattttaggacagaaggtcacacctatagcaaaggcaggagtatatgtgccgggcggcaaggctgtctatccttcatctgtactgatgaacgtgcttcctgcaaaggtagcaggcgttgaaaagatagttatgtgtacaccatgtggagctgacggcaaggtatatccttccacacttgtagccgcaaacgaggccggagtagatgaaatctacaaggtaggcggtgcacaggctatcgctgcaatggcatttggtacagagagtgtgccaaaggtagacaagattgttggaccgggaaatatctttgttgcccttgccaaaaaggctgtgtttggatatgtcagcattgattcaatcgcaggacctagcgagattctggtgcttgcagatgagactgcaaatccacgctatgtggcagcagatttactttcacaggccgagcatgatgagatggcatcagctatcttgatcacaacaagtgaggagcttgcaaagaaagtatcagaggaagttgataagtttgttgaggttctctcaagaaaagaaatcattgagaaatctcttgaaaactacggatatatacttgttgcagaggatatggatgaggcaattgatgcagtaaacgatatcgcttcagagcatatggagattgtcacaagagatcctttctcagtcatgacaaaaatcaaaaatgcaggagcaatctttatcggagagtactcatcagagcctttaggagactattttgcaggaccaaaccatgttctgcctacaaacggaacagcaaaattcttctcagccttatctgtagatgactttatcaaaaagtcaagcatcatctcatattcaagagaagcacttgagagaatacatacagatattgagcagtttgcagagtgtgagaagcttacggcacatgcaaattcaatcaaggttagatttgaggattattcaaaggagtaa

SEQ ID NO: 1976 - DNA, 2229 bp, Eubacterium rectale
atcaacatccatatgatgaaaatgccgctagtacaaatttttaagacctgtgcattggatttgaaatcagacatccatatggggcaacgaaaaggagagataatgagtaatatagataaatatgaaacacgaaaaaagatggtctatgacttcatgtgtgatgacatgtatgttccgatgaaaatcaaggaactttgcatagtactcggagtaaaaaaagaggacagaccacagcttgaacagattcttttggatttgcaggcagagggaaggataacactctcaaagcgcgggaaatactcaaagtcggaaattaaaaagacagtcggcgtattcacagcgcatcaaaggggatttggctttgtcactgtggagggagagcctgatgatatttttatccctgcagagtatgtaaatggtgcgatgcacatggacactgttgagattacaatctcacctgtcacaacaggacgccgcaaggagggaaaggttgtttccgtcatagagcgaggcatgaagcaggtagtctgcacctatgaggcaagtgataattttggttttgcagtgcctgacaataccagatttggcacagatatttttataccaaaggaacgctcaaagggtgctatgtcgggccataaggtagtggttgaaatcacaagctatggtaaaaagggcaaaaagccggagggcaaggttgttgaaataatcggacatatagatgacccgggtacagatattctttctatagtaaaggcttatgatctgccggtggatttttcggagaaaatcatgcatcaggtgcagaatgtggcaaaggatgtgacacctgcggatatggccggcaggatggatttacgcgactggatgatggtcacgatagacggagaggatgcaaaggatcttgatgatgccgtgtctttatacatggatggcgacaattatgtacttggagtacacatagcagatgtgtcgaattatgtgcaggagcacagtgcccttgatgtggaggctcttaagagaggaacatcggtttatcttgtagacagagtaattccgatgcttccaagagagctttcaaatggcatatgctccttgaatgagggatgtgacaggctggctctttcatgcattatgacaataaataaaaagggtgaagtcatcgatcataagattgcagagacagtcataaagacaaaccgcaggatgacatacacaaatgtaaaaaagattcttgcagataaggatgccgctgtgattgaagaatataaggagcttgtgcctatgtttgaaaaaatggcagagcttgcagcaattctacgcaaaaagagaatgaaacgaggttctatagactttgactttccggagactaaagtcgtgctcgatgaagatggtcatccgatagatataaagccgtatgacagaaatgtggcaacaaagctcattgaggattttatgcttatagcaaatgaaactgtggctgaggattatttctggcaggaaataccttttgtatacagaacacatgacaagccggattctgaaaaaatcgcaaagctttccacatttatcaataattttggctatacgcttcatattggagctgatgaggtacacccaaaggagcttcagaagcttttgatgaaggtggatggcacagatgaagaatccctgataagcagactgacactgcgctctatgaagcaggcacgatatacaacagcttgtacaggacattttggactggcggcaaattattattgccactttacatcaccaatccgcagatatcctgatttgcagatacaccgtatcatcaaggaaaatatccgcggtaggatgaatgataaccgcagggagcactatgagtctatactcgatgctgttgcaaagcaggcaagtgagaccgaacgacgtgcagaagaggcagagcgtgaaacagtcaagcttaaaaaatgtgaatacatgtcaaatcatattggtgaatgctttgaaggagttatatcaggtgtcacggagtggggctttttcgtggagcttccaaatacagttgagggacttgtgcgcgtgacagacctgacagatgatttctatgagttttacgaggatacctatgagctggccggtacagccaccaataagagatacaagcttggacaaaaaatcaaggttgttgtggacagtactgacaaaattatgcgtacaattgattttaaaccggcggaataa

SEQ ID NO: 1977 - DNA, 2457 bp, Eubacterium rectale
atgactggaggatatgacttgaaaccatatacaagtaaggctaaaaaagcaatagatttggctgcacgtatatcaaagaaaatgaattacagctatgttggaacagagcacatactggctggccttataaaagagggcaccggtgtggcagctgaggttctaacagcctgcaatgtggaatatgataagcttatttcgatgattgaagacctgatttcaccgggggataacatcgaagtgatggacagggatggctattcaccaaggacacagagagtattggagcgtgcatcggaggaagccgatagatttgagtgcaatgagataggtacagaacacttgctgatggctatagtactgcagggagactgtgcagctgcaagacttttaaacaccatgggtgttaacagtcagaagatgtttatagatattcttggtgcgatgggtgaggatccgtctgcatacagggatctgatgaaaagctatggtacatcatacaattctgcgactcctgtattagatcagtattccagagatttgacagatatggcagaggcagggcttcttgaccctgttataggcagaaaaaaggagatggagcgcgttatccagatactttgccgccgtggcaaaaacaatccatgtctgattggagagccgggagtgggcaagaccgctatagtagaaggacttgcgcaggatatagtcagtggcaatgttccggatattcttttgggaaagagactggtttcccttgatatgtccgggcttgtagccaaatcaaagtatcgtggtgagtttgaggagcgtatcaagaaggtgataagcgaggtttcaaatgccaaaaatgtactgcttttcattgatgagcttcacactataataggtgcaggaggagcagaaggctcgttagatgcatctaacatattaaagccggcacttgccagaggcgaggtacaggtaatcggcgccactaccatagaagagtaccgcaaatacgtggaaaaggatgctgcgcttgagcgccgtttccagccggtgatggttgaggagcctggtgtggatgagacaatagagatactcacaggattaaagggaatctatgaaaagcatcatggtgtcatcataacagatgagggtgtgaaagcagcagtaaacctttctgcacgatatataaatgacagatttttacctgataaggcgatagacctgatggatgaagcggcagccaggataaggcttaagaatctgacatcatctgacgagctgcttgctctgaaaaaagagataacagataagcagaaccgggtggaaaatgctttgtcgaaaggagatctcgcagctgccggcgcgcttatgtcagaaaaggaagtgcttgaaaataaacagcagaagcttatcagaaagaaccgtcgcacaggagccaaaaatcagcctgtagtcggcgaaaatgagatagcggatgtagtatcgggatggaccaaaatacctgtaaataagcttacagagtcagaggcaggacgacttgcaaagcttgaacagatacttcacaagcgtgtaataggacaggaggaggctgtttctgctgtcgcaaaggcagtcagacgaggccgggttggtttaaaggatcctaagaagccgattggctcattcctgtttttgggaccgacaggagtaggtaagacggaggtgtcaaaggcgcttgctgaggctgtctttggcaaagaagatgccatgatacgtgttgacatgtcagagtacatggaaaagcatagtgtttcaaagatgattggttcaccaccgggatatgtgggccatgaggagggcggacagctctcagagaaggtcagacgcaatcctttttctgttatactgtttgatgagatagaaaaagcacatcctgatgtgttcaatatacttttacaggtgcttgatgatggtagaatcactgattcacaggggcgcacggttgatttcaagaatacaataatcatcatgacatcaaatgcaggagcttcttctattatagaaccaaagcgccttggctttggcgctggtgaggatgaaaagcaggatcacgagcgtatgaagaacagtgtcatggaggaggtccgccgtatatttaaacctgagtttttgaaccgaatcgacgagactattgtatttagagctctcaacaaggatgacatgaagcatatagtgacacttcttgtaaaggagcttaagaaacgctgtaaagaacagcttgatatagagctcacagtgcgcgacagtgcaaaatcctttatcgtggacaaagcctatgacagaaaatatggcgcaagacctcttaaacgaaagcttcaggaggagattgaagaccgtatgtcagaggatattattaccggcaaaattaagcgcggcaataaggtaataatttctacgaaaaacaaacaaatttcattgactgttgagtag

SEQ ID NO: 1978 - DNA, 1452 bp, Eubacterium rectale
atggacaaaatgaaaatattaatggccgcatcagaggcaataccttatatgaagacaggtggactagctgacgtagtgggatctttaccgaaatattttgacaaggacagatatgacgtgagagttatacttccgaagtacaaatgtatggatgataaattactgccacagcttaagttcgtctgtcatttttatgtcaatctcaactggcgcaggcagtatgtggggatttttacatcgcagtatgatggtgtgacatattattttgtcgacaatgagttttactttgcaggagataagccatacaacaatatatacgaggatgtggagaagtttgctttcttttcaaaggcggtgcttgaggctttgccggttatagattttgccccggatgtgatacattgtaatgactggcagacaggactcttgccggtttttctaaagacagtatacggctcagacaatttctatgccggtatcaagacagtctttaccattcacaatatgaagtttcaagggcgatggaagattaaagaggtggctgatgttacaggacttccggagcatatttttaattcaggggagctggagttctatggtgaggctaattatttaaagggcggcatagtatatgcagatgagattacgactgtcagtccgacatatgcagatgaaatctgtacacctgagggcggagagggcctggatggcctgatgcttgagcggcgcaggcatttgagaggcattgtaaacggtatagattatgatgtctttaatcctatgaaggatacatatctggataagcatttttctgtaagggaattgagtggaaaggtcgttaataagcgtcagctgcaggagaagtatggtctggctgtggataaggatgtcatgctgattggaatagtttcgcgtctgacaaagcagaagggctttgatctggtggcatatgtgatggaggagatgctttccaccatgaatgtacagtttatagtgcagggcacaggagagcagcagtacgaggagatgtttaattatttccatggcaggtatccgcagaagcttggagtatatatcggttactcagaggaaaatgcacatgagatatatgcaggctgtgacgcatttctcatgccgtctctttttgagccgtgcggcttgagccagctcatgtctatgcgatatggtacgctgcctatagtcagggagaccggtggtcttaaggacactgtagtgccgtacaatgagtacgagaatacgggcgatggcttttcctttgccaattataatgcgcatgatatgctgcatgtcatcaaatatgctcttgatgtgtttgaaaaccataaggacagatggcaggagatgatgcagcgcgccatgaggcatgacttctcatggaaggcatctgcgaaagagtatgagaagctttacgacatgctgcttggcaactag

SEQ ID NO: 1979 - DNA, 1707 bp, Eubacterium rectale
attattttcggaggaacatttatggagaacgaggcaacagtttcgaaaaattttattgaacagattattgagaaggacttggctgagggtcattgcaagactgtaaagaccagattcccaccggagccaaacggttatttgcatatcggccatgcgaagtctattcttttaaactatggactggcaaagaagtatgacggacagttcaatctcaggtttgatgatacaaaccctaccaaggagcgtctggagtttgtagagtctatcgaggccgatgttaagtggcttggtgctgactgggctgacaggaagttttttgcatccaattatttcgacaagatgtatgagtgtgcagtaggactgataaagaagggaaaggcatatgtatctgatctgacacctgatgagataagagagtatagaggtacactcacagaggccggcaaggaggatccatactcaaagagaagtgttgaggaaaacttagacctttttgagcgcatgaaaaacggtgagttcgaggatggcacaaaggtacttcgtgcgagaattgacatgagctcttcaaacatcaatatgagagatccgattctttaccgtgtggctcatatgacacatcacaatacaggtgataaatggtgtgtatatcctatgtatgattttgctcatcctatagaggatgctattgagggcatcacacattctatatgtactcttgagtttgaagaccacagaccgctgtatgattgggtggttattgaatgtggatttaagaattctccagaggagtcgccaaagcagattgagtttgcaaagctctatctgactaatgttgtaacaggaaagagatatatcaagcgtcttgttgaggacggtatcgttgatggctgggatgacccgaggcttgtttctatagcagcgctcagacgcaggggcttcacaccagagtctatccagaattttgttgatctgtgtggtatatcaaaagctaacagctctgttgactacgctatgcttgagtactgtatccgagaggatttaaaggctaagcgccctcgtatgatggctgtgcttgatccggtcaaggtgattatcgacaattaccctgagggacaggttgagtatcttgaagtggacaataacgtggagaatcctgagcttggaaagagaaaagttcctttcaccagagagctttatgtggagagagatgacttcatggaggagccaccgaagaagtatttccgtatgttccctggcaatgaggtgcgtttcatgaatgcttattttgtgaagtgcaatagctgtgtgaaggacgaaaacggcaatattacagagattcactgtacatatgatccggcatcaaagggtggcaacagtcctgatggcagaaaggtcaagggaactatccactgggtttcagccgagtatggaaagcaggtaactgtacgtctttacgagaatatcgtaaatgaggagcttggagtgtacaatgaggacggaagcttaaatcttaatcctaattcactcacagtgcttgataactgtgtagtggagccggagcttatgagtgccaaggcttatgacagcttccagtttgtcagaaatggcttcttctgcgcggattgcaaggactcaaaggatggacagcctgtatttaacagaatcgtctcattaaagagctcattcaagcttccgacagctaaatag

SEQ ID NO: 1980 - DNA, 2508 bp, Eubacterium rectale
tcctttgggagagtttcttcttggagctctcccttttttatgttcattgtattaaaaatgtctggagttagactgaaaatattgccggaacacaaaaccgttgacataatccggaatatgcagggagagtacatgacagaagctggaaataactatagtgaaaagaaaacacaattacatatttcggtcagaaaccttgtggaatttattttcagggagggtgacatagacaaccggtcatccagagcaatgagtgctgatgccatgatggagggaacacgcattcacaggaaaatccagggcagcatggggaaggagtatcaggcagaggtgccgctttcccttattgttgaaggtgatttgtatgagctgactgtcgagggcagggcagatggcatctttacggaggatggaaagtgttttgtcgatgagattaagggaatgtacagaaaggttgagctgtttgagaagccggtttttgtgcaccgtgcgcaggctatgtgctatgcatatatttttgctctgcaaaataatatggaaacgataggcattcagatgacctactgcaatctggaaacggagcagactaagtattttcgcgaggagttctcatttgaagagataaaaaaatggtttgatgacctgatggaagagtatggcaaatgggcaacgtttcagtgtgaaatgaaaaataaaagacaggcttcaatcaaagaacttaattttccgtttgagtacagaccggggcagaaaaagcttgtttcggatgtctacaggacaattatgcgtcagaagcttctttttatgcaggctccgaccggtgtgggaaagactatctctactatttttccggcagtgaaggcggttggtgaggaactggcagacagaatcttttacctgacagcgaagacaatcaccgcaacagtcgcaaaggaaacgtttgcgctgcttgaaaaaaatggttacagggcaaaaactattcagataacggcaaaggaaaagctatgtccgtgtgatgagatggaatgcaatccggtaacctgtccgtatgcaaaggggcattttgacagagtaaatgatgcggtttttgacctgcttcacagatgtgaaatgattgagagggatgatattttatcacaggcggataggtataccgtttgtccgtttgagctttgtcttgatacggctagctggtgtgataatgtcatctgcgattacaactatgtgtttgacccaaatgtttatcttaagagattttttcaggaggggataaagggagattatatttttctcattgatgaggctcacaatatggtcgaaagaagcaggcagatgtatagcgctcagatttataaggaggatttccttactgtgaagcgcattatgaaggagcacagccgttctattgagaaagcgcttgaaaagtgcaataagatactgcttgggatgaagcgtgagtgtgagaattacacggtatatgatacacttggcaatatggtattttcctttatgaggcttatgacacttctggatgagtttttgcagaaagctaatgagttcccggggaaaaaggatgttatggatttttattttgaacttcgcaatttcctgaacatttacgatctggtggatgagcactatgtgatgtattccgagcttgaggctgatggcaggttcatgctaaagcttttttgcgtggacccatcgcttaatatacaaaagaggctggataagggcaagtcagctgtgtttttttcggcgacatttttgcctgtaaactattacaagagcctgctaagcacaaaaaaagacaactatgccatatatgctgacagcacgtttgacagcaaaaagaggctgcttgcgatggcaaccgatgtgagtacaaggtacacgaggcgctcaaggagtgagtatgagcgcattgcagggtatattaatgctgttgtcacgcaaaagactggaaattatatggttttctttccgtcatataagatgatgaatgatgtggcagatatttactgtgaaaaatatgcagacgaaacagagcttatgctgcagaaaaataatatgtcagaggctgagagggaggaatttctggacaggtttagtgaggaatcggacagaacacttgtggcatttggtatcatgggaggcatattcggtgagggcattgatttgaaaaacgacagactgataggtgctattgttgtcggaacgggacttccgcagatcagcaatgagagaactatattaaaggattattacgatgccgaaaacggctgtggctttgactatgctttcaggtatccgggcataaataaagtcctccaggcggccggaagagtaatcaggacgacggaggacacaggtgtcattttgctattagatgagagattctggcagagagaatatgatttgctctatccacgcgagtggagtgacagaaagccatgcaatatagcaaatgtcggaaaactagttgccgacttctgggagcagatttaa

SEQ ID NO: 1981 - DNA, 1275 bp, Eubacterium rectale
ataaacatgaaaaagacaccatttgtgacaaaacaacaggtagaggagattgttaaacaatttcctacaccatttcatttatatgacgaggctggcatccgtgccaacgcgcaggctgtaaaggatgcatttgcatggaatccgggttttagagagtattttgctgtaaaggctaccccaaacccatacctgctcaagattttaaaggattatgacatgggctgtgattgctcatcatacacagagcttatgcttgcaaagtcatgcggcttcgatggagagcatatcatgttttcatcaaatgatacaccggcagaggaatttgcatatgctgacaagcttggtgctatcatcaatcttgatgatttcacacatattgattttttggaggaaacaatcggacatattccggagacaataagctgcagatataatccgggcggagtgttcacactgtcaaacggtatcatggacaatccgggagactccaagtatggaatgacaaaggaacagctttttgaggcattcaaaattcttaagtcaaaaggcgctaaatactttggcgtgcatgcattcttggcaagtaatacagtaaccaacgagtattatccacagcttgcaaaggagctttttgagctggttgttgagcttaaaaatgagaccggatgtgatattagatttgtaaatctttcaggtggagttggcgtggcttataagccggatcagacaccaaacgatatatcggttatcggcgccggtgtacataaggtgtacgatgaggttttggtaccggcaggaatgggcgatgtggctatttacacagagatgggacgttttatgatggctccgtatggctgtcttgtgacaaaggctatccatgagaagcatatctacaaggagtatataggagtagatgcgtgtgcggcaaaccttatgagaccggctatttacggctcataccatcatatcacagtgctcggcaaggaggatgcaccttgtgaccatacatatgatgtggtaggctcactctgtgagaactgtgacaagtttgcaattgacagacagcttccgaagattgatatgggagactatctggtaatccatgatacaggagcacacggcttctcaatgggctacaattacaacggacgacttcgctcagcagagatactgctcgaaagcaatggagaggcaaaactcatcagaagagcagaaactccggcagactactttgcaacctttgactgctttgatgatattaaaataacagagtaa

SEQ ID NO: 1982 - DNA, 1611 bp, Eubacterium rectale
tgtttggaggaaatatcagtggataacttaagacaggaaatagaaaaaagaagaacatttgcaataatttcccatccggatgcaggaaagactactttgacagagaagtttcttttgtacggaggggcaataaaccaggccggttcggtaaagggaaaggctacggcaaagcatgctgtttcagactggatggagatagaaaagcagagaggtatttcggttacttcatctgtattacagtttaattatgacggatattgcatcaatatccttgatacaccgggacaccaggatttctcagaggacacataccgtacactcatggcagccgattcggcagtcatggtaattgatgcgagcaagggtgttgaggcacagaccagaaagctctttaaggtctgtgtcatgagacatatcccgatttttacattcataaacaagatggaccgtgatgccaacgatacgtttgagcttctcgatgacatcgaaaaagagctgggcatcgcgacatgtcctatcaactggccgataggatcaggaaagcagtttaagggcgtgtatgacagaaacagcaaggaggtcatgacctttgcagataccttaaagggtacaaaagagggctcggagaagattattcatatagatgatccggctctttcagatgagatcggagaggaatttaaaagtcagctcatggatgagattgagctgctggatggcgccagtgccgattttgatatggagcttgtcacaaagggagagctttcacctgtatttttcggctctgctcttacaaactttggtgttgagacatttttacagcatttccttaagatgacatatgcaccgacagcaagacaatctgacatcggaatgattgatcctttttcagaggatttttccgcatttgtattcaagattcaggccaacatgaataaaaatcacagggacagaatagcatttatgcgaatctgctccggacagtttacagccggcatggaggtataccatgtgcagggaggcaagagcctaaagctttcacagccgcagcagatgatggcagatgagagaaaaatagtggacaaggcatatgcgggcgatatcataggtgtgtttgacccgggcgtatactctataggagatacactcacgacagcaaaggataaatttgagtttgagggcatcccgacatttgcacctgagcattttgcgagggtatcacttgttgattccatgaagagaaagcagtttgtaaagggcgtcacacagatagcgcaggagggtgctatccagatgttccaggagtacaagggcggcatggaagagatcatagtcggcgtggtcggtgtgcttcagtttgacgtgcttaaattcagacttgaaaatgagtacaatgtgcagatcagactagagaatctgccatatgagcatatcagatggattgagaacaaggatgaggtcaatgtagatacaattaacggaacaagcgacatgaagaaggttgtcgatatgaagggcaatccgcttcttctgttcatcaatgagtggagcatcggcatgacactcgatagaaatgacggacttgtgcttactgagtttggaagaaactag

SEQ ID NO: 1983 - DNA, 2277 bp, Eubacterium rectale
gtgttcatatatggcaaggaatgctgtgaaaaagtgtcagaaatcaaatacaatataatatatgtgtcatatcggatatacaaattgatggatttgtatatctcacatgacaaatcgaagagattgaatatttatttattcggtctttttttttatacttcaatacgaataaaagaaagagtggtgaatctaatgattaaatttggaaaaggagtcgtaaaacatcgtgtgctgatactgatagttgcatttgcactgcttataccgtcgggcatcagctttatcaacacgagaatcaactttgatatcctttcttatctgccaagccagatagagactatgaagggtcaggatatcatggtagatgagtttggaaccggagcgttgtcatttgtgatcttagaggatatgaaggatcaggacatagagactctggcagatgacatagaggaccttaagggtgtaaatgatgtcatctggtacggaacaatcgctgattccacattgccaagagaggcaattccggatgaggtgtacgacgcattcaacaacaaggatgcaaacagccagctcatgctcgtcacctacagtgacacaatgggttcggatgagacaatggaagccgtcaacaagatggataagatggtgaaaaaccactgcttcgtagcaggaatggcagcggtcaacgcagatacaaagacacttgttatgcagcaggctcctatatatgtcatcatagcagcattgctttcaatgctcgtcatgggaattacaatggattcaataattgttccgatgttattcctcctaagcataggaatggctattatctataacctgggaacaaactttatacagggacagatttcatatctgacactggcactgacagcagtattgcagctcgccgtaacaatggattattcgattttcctgtggcacagctatcaggagcagatagacagatatgacggagacaagaagcgagccatggcacatgccatttcccacacaattgtctcagtaacaggaagctcaatcacaacaatcgcaggcttcgtagccctctgcttcatgagctttacacttggacttgacctgggaatcgtaatggcaaagggcgttgtattcggagttatcggatgtgtaacaattctccctgcactgattcttgcatgtgataaggcaatcgagaagacaaagcacaagattcttatgccggatgtttccaggattgcaagctgggtaacaaatcattataagatacttgcagtgattttcatcgtagtgctcatcccggcaatatacggatacactcatgatcaggtctactatgaccttgcaggaaccatgcctgacagtgcatacagtaagcaggccaatgaaagactcgacaaggagtatgctatgggtgccacacatatcatcatcgcgccgagcgatatgtcaaaggcagacagcataagcatgatagatgatataaagaaggtcgatggagtaaagcttgcggtatcgcttgactcaatactcggacctaccataccggatgatatggtgccggatgaggcaaaggagatattcaaaaacggtgattaccagatgatgcttgtttcatcaaaatatgagacagcatctgatgaggtaaacaaccagattacagagattaaaaagatagtaaagaattacagcaaggacgcaatgcttatcggtgaggcaccttgtacaaaggatcttatcactatcacagatacagactttaagcgtgtaagtgcagtatcaatcgtattgatattccttatcatcctgattgtattcaaatcggtatcgcttccaatcatacttgtagcggtcatcgagtttgcaatctttgtaaacatgggaattccgggatttacaggaacgaagcttccgtttatcgcgagcatcgtaatcggaaccatacagcttggtgcaacggttgactatgcgatacttatgaccacaaagtacagaaagaacagatacaccggaatggacaaaaagccggcaatcacaaaggcacttgcagattcgacaaactcagttattgtcagtgcactttgcttcttcgccgcaacctttggtgtaggactttattcaaacattgatatgatcagttctatctgtatactgcttgcacgaggcgcaatcatcagtatgtttgtagtagtatttatacttccgtcaatgtttatgatttttgacaaagtaatatgtgccacaagcgcaggctttaaaaacaagaacttgacagcttag

SEQ ID NO: 1984 - DNA, 2154 bp, Eubacterium rectale
gatttggatgaaaagaaaggatgtagaaagatgagcgagaaagaatacttcaatgtagcagacatctttggagagaacgtatttaacgatgcagttatgcaggagcgtcttccaaagaaggtttacaagaagctccatgaggttatggacgaaggaaaggagcttgatctcgagactgctgatgttatcgcacacgagatgaaggaatgggccattgagaagggtgcaacacactatacacattggttccagccacttacaggcgttactgctgagaagcatgattcatttatcacttctccaatgccaaacggaaaagtacttatgagcttttcaggaaaagagttaataaagggtgagccggatgcttcatctttcccatcaggtggtcttcgtgctacatttgaggcaagaggatatacagcctgggattgtacatcacctgcatttgtcagacaggatgcagcaggcgcaacactttgcattccaacagccttctgttcatacacaggcgaggctcttgatcagaagacacctcttcttagatcaatggaagcaatcaacgatcaggcactgagacttcttagattattcggaaatacaacatcaaagaaggttacaccttctgtcggacctgagcaggagtacttcatcgtagaccgtgagaagtatttacagagaaaggatcttatcttcacaggacgtacacttttcggagctatgcctccaaagggacaggagatggatgatcattatttcggagctatccgtgagagaatcgcagcttacatgagagatgtaaacaaggagctctggaagcttggtgtttcagccaagacacagcacaacgaggtagcacctgcacagcacgagcttgcacctatctatgctgagtgcaacgtagctgttgaccacaaccagctcatcatggagacactcaagaaggtggcaggccgtcacggacttcagtgcttacttcatgagaagccattcgcaggagttaacggttcaggaaagcatgacaactggtcaatcacaacagatgatggtatcaacatgcttgagcctggcaagacaccacatgacaatgtacagttcttacttgtactcacatgtatgttaaaggcaatcgacgagcatgcagcacttcttcgtgcggcagcagcagatgtaggaaacgatcacagacttggagctaacgaggcaccacctgcaatcctttctatctatcttggagaccagcttggagacgtattgaaccagcttatcgcaacaggtacagctacacacagcttaaagggtgagaagcttgagacaggtgttaagacaattcctgatttcatgaaggatgctacagaccgtaaccgtacatcaccattcgcattcacaggaaacaagttcgagttccgtatggttggttcacaggattctgttgcacaggccaacatcgtgcttaacacaatcgttgctgaggcattctcagacgcttgtgatatacttgagaaggcagacaactttgacctcgctgtacatgatctcatcaaggattacgcagtagagcaccagagaatcgtattcaacggaaacggatactcagatgagtgggtagctgaggcagagagacgtggacttccaaacatcaagtctatggtagatgcaattcctgcatacgttgctcctgagtcagttgcagcattcgagaagttcggtgtatttacaaagacagagcttgagagccgtgccgagatcgagtatgagacatatgcaaagactattaatatagaagcaaaggctatgattgatattgccggaaagcagattattcctgcagttatcaagtatgttacatcacttgcacagtcagttaactcagttaagagtgcagttgctgatgcagatgtatctgttcagtcagagcttcttacagagagctcagctcttctctcagatgcacaggttgcacttgcaaagcttaaggatgagacagcaaaggccggtgctatggaagagggcagagagcaggctgtttactatagagatgttgtaaagactgctatggatgctcttcgtactccggttgatgagcttgagatgattgtcgacaaagagatgtggccaatgccatcatatggcgatttaatcttcgaggtttaa

SEQ ID NO: 1985 - DNA, 1023 bp, Eubacterium rectale
agacacaggcagactaaaacggaggcagcagctatggcaggatttaaggatatagtaggaaatgagcagataatagagcatctgcaaaatgccatatcaatgggaaaggtctcacatgcatatataataaacggaccacagctgtccggcaaaatgatgatagccgaggcatttgccagggcactgcagtgtgagaaggagggcacagacggttgtggagagtgcaaatcgtgccatcaggcagatgaccacaatcatcctgatatcatatatgtcagtcatgaaaagcccaacaacatatcggttgatgacataaggacacagctcaacaacgatatagtgataaagccgtacagcagtaaatacaagatttacatagtggatgaggctgaaaaaatgaaccagcaggcgcagaacgcgcttttaaagaccattgaggagccaccggcatatgcggtcatcatgcttctcaccaccaatgcagacagctttctgcagaccatcaggtcgcgctgcatcacactcaatatgaagtcggtaaaggacgaggtgataaaggcatacctgatgaacgaaaagcatattccggattatcaggcagatatcagtgccgcatttgcacagggcatcgtcggaaaggctgttaagctcgcctcatcagacgagttcaacgagctaaaggagtcagcactgtcgcttataaagcgcctcgatgacatagatttgtacgagctgggcgcagcggtaaagcagatagctgagtacaagcttaaggtgcaggattattttgacctgattatggtgtggtacagagatgtgctgtatatgaaggcgacaaacgatgttaacggactcatattcaaggatgaggtctatgatataaagaaacaggcagcaaagcattcctatcagggaatcgaggcaatacttgaggcgcttgagaaggcgaagataagaattaacgcaaacgtcaattttgatctggtaattgagctgctgcttatgaccataaaggagaactaa

SEQ ID NO: 1986 - DNA, 3843 bp, Eubacterium rectale
gtgaaaatcgcagtaatcacattgtctatcaaactaaggcaggacattatcaagaaaagaagaaggaggggtcagatgatatccagatatagtgtaaaaaagccttttactgtacttgtaggagtactgctggtaatagtacttggtgttgtatcgcttggcaggatgacgacagatctgctgccggatatgagctttcagtatgcacttatcgtgacaacagatatgggagcaagtccacaggaggtggagagcgatgtcaccgcgccacttgaagcagctatggcaactacgtccaatatcaaaaacgtaagctcaatgtcatataacagctattcgctggtgacatgcgagtatgagcagaatgccaacatggattctgtagtgatagagatgcagcagaaaatagatcaggtcaaggctggctggaaggatggagtgggtactccgaccattatgaagataaatccggacatgcttccaatcatgatgactgctgtggatatggatgggaaaagcaagtcggaaatcacagactttgtggaaaacacactaaagcctgcaattgagagcacagaaggagtcgcatcagtgactgcaacaggtgagctcaccgagcagatacaggtcacgatgaatcaggccaagatagatgcgctcaatgagaaaataaataatgccgtttcaaagaaatttgacgatgcaaaaagtcagatggatgatgcaagcgcaaagatagagagcggacaaaacgcaatcacatctgcatcggatcagatgagcgcgggagtggatacgctaaaggagcaaaaggcaaagcttgcagagcagaagactcagctagagagcacactttcaagcttaaatgagcagaagagccagctcgaaacaattcagtcagctctttcagacttcatgaatagtgatacatatacaaagacaattccgtcactcaaagagggcgcaaatgcaccgggtgaagcgggcacagcactcaaagcgcagcttgagcaggttaataagcagattgcaacacagttttcaggtctctcggcgcttggaatcaccgtaaacacagcagatgatctgcctgcggcagcgtcagcgatagcacagactctcattcaggtgaatacaggtatagagcagtgccaaagcgggcttgaccagatagcacaaggagagacagcacttttagatgcctatgataatctaaacagtcaggcagctataagctcgataagcataggacagcagtcagcacagcttgcaacagcagcggcatctcttgacagctcaaagaaggagcttgaaaagagtaaggatgatgcacttgacaagtcaaacttaaatgcagttttaacaattgactcgctctcgcagcttcttgtcgcacagaactttgacatgcctgcaggctatgtaaatgattcaaatggcacgcagtacatagtacaggtgggagatgaaataaaatcaattgatgatttaacaaatctagtgcttatggatatgaagcttgatggaatagctcctattcatgtcggtgatgtggcagatgttgagatgactgacaactcggatgagacatatgcgatagtcaacggtaatcccggaataatgctctccatggagaagcagaccggctactctacaggagacgtcacagaccgtcttttagacaagcttgattcgctggaaaaggaaaatgacggattacacaccacagtgctcatgaatcagggcgtatacatcgacatggttgtaaaaagtgtgatgcagaatatgatagtgggagcaatacttgccattttcgtactgcttttgttcttaaaggatataaagccaacacttgttatcgcagcatctataccgctatcggttgttgtggcagtggtgcttatgtattttacggatatcaccttaaatatcatttcaatgtcgggacttgtgcttggaataggaatgctggtggataattcaattgtagtaatcgagaatatctacagattaaggggggagggatattcggtaaagaaggcggctgttgagggtgcaaatcaggtggcaggagccatttttgcctctacacttaccacggtaagtgtgtacgcgccaatcatttttactgatggaatcacgagacagctctttgtagacctggcacttacggtagcgtttactcttatggcatctcttgtagtggcactcacatttgtaccggcaattgcttcaggcatgctcaaaaagacgaaggatataaagcatccatggtttgaccgttttaaggattggtatggaaatgtgctcggcacatgtcttagatttaagccggtggtatttattgcggcagtattgcttttagtcggcagtggcgcactttgcatgtcaaggggaatgacatttatggatatggacatggagtcaaatcagatttcacttaccatagaggcaaaggatgacgaaaagcttgacttcaagcagcttacagagctgtctgataaggtcatggacaaaatatctgatataaagggcatagacacaataggagctacagcaggcggcagctcgaccatgaacctgatgagctcaggaagcgacagcgtgagcatgtatatattgcttgatgagaagtcggatgtttcatcggataaggtaatagatgaaattgaaaaacgcacaaagaatctggactgcaaggtaacagcatcttcgcaggctatggactcatcagagtttttcggaagtggtctctctgtcaggattaagggtaatgatatagacaagctgcagaagcttgcaggtgatgtggcagatatccttaaggacacaaagggcgtgacagatatagatgacggtcttggagatacaatcaatgagcttaagataactgtggataaggaaaaagcagcaaagtatggctatacggtggctcaggtataccagctcgtatccggtgagatatcatctcaaaagagtgcaacaaccattacgaccgacataaaggactatgaggtatacctacaatctgcagagcagtctgatgtgactgtggacgacattaaaaaccttacatttacctataaggataatgatggcagtgaaaaggagattccgctcagtgatatctgcactatttcgcaggaacagacactaagtaccattcatcgagatgctcagacaagatatattacagtatcaggtgcggttgatgaaaaccataatgtaacattactaagcgataaaattaaatcaaaaattgataaacttagcattcctgatggctattcaatagacatggagggcgaggatgagacaataaatgagtcaatgagtcagcttgtacttatgcttgtgctagcagtgatatttatctatcttatcatggtggcgcagttccagtcattgctttcaccgtttattatcatgttctgtatacctcttgcgtttacaggaggctttatagctcttttcatcacgggaaatgagctcggaatcatatcaatgcttggctttatcatgctggcaggcctcattgtaaataatggaatcgtgctcattgattacatcaatcaggccaggagagagggcatgagcaagcatgaggcaatcatagacgcaggccgtacaaggcttcgtccaatactgatgacagcgatgaccaccatactcgcaatgtttacatcggcgataggtatcggagatggctcagatatgataaagccgatggcaatcgcaataataggaggtctcgtatacggaaccatccttacgcttatagtaattccatgtatctatgatgcgttcaacagagagaagagcatggtagaggaagagctgtaa

SEQ ID NO: 1987 - DNA, 1284 bp, Eubacterium rectale
atgaaaaagtatacagaaatgacaaaggacgagttaatgcaggaaaagacagcacttgaggctgagtacgagaagattaagaatcttggcttaagccttgacatgtcgcgtggaaagccgggagcagaccagcttgacctctcactccctatgctcgatgtcttgaaatcagacagtgatatgaaaagtgaatcaggacttgatgtgagaaactatgcatgtctggacggaattcctgaggcaaaggcccttatcgcaggcatggtgggagcaaagcctgagcaggctatagtatatggaaactcaagtctcaatatcatgtatgatcaggtttcacgtgcatttatctttggtctttgcggcaatacaccatggtgcaagcttgacaaggtgaagttcctctgtcctgtaccgggctatgacaggcactttgcaatcacagaggagtttggagttgagatgataaacatccctatgactgaggatggtcctgacatggatatggttgagaaatatgtcaataacgatgcctctgtaaagggaatctggtgtgttccaaaatactctaacccacagggtgttgtatactctgatgagacagttgagcgctttgcaaagcttaagcctgcagcagatgattttagaatcttctgggacaatgcatacacagttcatcatctctatgatgataaacaggcagagattccaaatatccttgagctttgcgagaaagagggaaaccctgatatggtatttgagttttgctcaacaagtaaggtgacattccctggtgcaggcgtggctggtatatgcacatctgagaaaaaccgtgaggatatcaagaagcgccttactatacagacaatcggacacgacaagattaatcagcttcgtcatgcgagattctttaaggatgtagatggtatcaaggctcatatggcaaagcatgcagctcttatcagacctaaattcgagctggttgagaatatcctcacagatgaaattgcttcaagaggcatcggaacatgggttaagccgctcggtggatacttcttcggatttgaggctctttcaggctgtgcaaaggaaatcgttgcaaagtgcaaggaagctggtgtcacaatgacaggtgcaggctctcctttcccttacaagaaggatccggatgacagcgtgataagaattgctccgacatatccatcacttgatgagttgaaaaaggctgcagaggtgtttgttgttgtcacacgtcttgtcagcgtaaataagctgctcgaggcataa

SEQ ID NO: 1988 - DNA, 2133 bp, Eubacterium rectale
acaatgtttacatactataataatgtcagggaggtacttgaaatgaatgtttacactactgagaagattcgaaacgtcgtgcttttaggccatagtggctgtggcaagacatcactcgtggaagctatggcatatctggcaggacagactaccagaatgggcactgtagcggatggcagcactatcagcgattttgacaaagaagagataaagcgtcagttctctatacatacatcggttgtaccgatagagtgggataatgtcaaaataaatattctcgatactcctggtttttttgattttgtgggagaggttgaagaagctgtatcggctgcagatgctgcaatcatcgtggtttcaggcaaggcaggcatacagacaggcacaaaaagagcatgggagatatgcgagaaatacaagctgccgaggatgattttcgtgacggacatggatatcgacaatgcaagcttcaaggatgtggtattaaagctgcaggagctttacggcaagaaaattgctccatttcatctgccgatcagagagaatgagaagtttgtgggctatgtcaatgtcatccagcagagggcaaagagatggaatgaaagcggaggcgtggataagtttgatgtgcctgagtactcaaaggagaacctgggaatatgtcgtgaggctttagttgaagctgtagctgagacaagtgaggagttcatggacagatatttcggcggagaggagttttctgatgatgaaatcagggctgcgcttcgtgcaaacgtgcttgagggctctattgtaccggtgctcatgggctcaaatattctcgcaagaggcatgtatacacttatggctgatattgtgaaatacctgccaagtcctgagaagagaagctgtaccggtattaacaccaagacaaatgaggtgtataatgctgattatgattttgcaaaatcaaagagcgcttatgtgttcaagtctatagttgacccgtacatcggtaagtattcactgatcaaggttaattcgggcgtactaaagacagatgatgtactttacaattatcacagggactgcgatgagaaaatcggaaagctctatgtgatgagaggcagtaaggtggaagaggtgaaggagcttcatgcaggtgatatcggagcgcttgcaaagcttacaaagactcttacgacagattcactttccaccagaaatatgccggttacatatcttagaacaagtatatcaaagccgtatgtggcaatgcgctacaaggcaaagaaaaagggcgatgaggacaagatttcccagtctttacagaaactgttaatggaggatctgacattaaacagtgtaaatgacagcgaaaatggacagactgtactatatggtatcggtgatatgcagcttgaggtagtggcaagtgagcttcttgaaaagtacaaggtggagatagagcttatgcgtccaaaggtagcctttaaggagactatcaggaaaaaatctgacgtagagtataagtacaagaagcagtcgggcggacacggacagtacggacatgtcaagatgacctttgagccgtcaggagatatggatacgccatatgtatttgagcagacggtcgtaggaggagctgtaccgaagaacttcttcccggctgttgaaaagggtattgcagagtccgtgaaaaagggacctcttgcagcctatcctgtgacaggtataaaggctgtgctgtatgacggctcttatcatccggttgattcatctgagatggcctttaaggtggcaacacagcaggcctttaaaaagggcattatggaggcaaagccggtgcttcttgagccgattgccactcttaaggtagtggtgcctgagggctatacaggtgatgtgatgggtgagcttaacaagagacgtgcgcgggtgatgggcatgaacccgacagacaatggatatcaggagatagttgcggatattccttatctggagctttatggatacaatgccacacttcgctcaatgacgagcggaagcggcacattctcatatgagtttgccagatatgagcaggcaccggatgatgtggctgcaaaacagatagaagaaagggcaagcaagcttgttgaagttgaagagtag

SEQ ID NO: 1989 - DNA, 1113 bp, Eubacterium rectale
atggcaagtttatcattaaagaacgtttgcaaagtttatccaaacggatttgaggcagttaaggatttcaaccttgaagtagaagataaagagttcatcatcttcgtaggaccttcaggatgtggaaaatcaacaacacttcgtatgatcgcaggtcttgaggagatttcttcaggagagcttatcatcgacggaaaggttatgaatgacgtagagccaaaggatcgtgatatcgcaatggtattccagaactacgctctttacccacatatgacagtatttgacaacatggcatttggacttaagcttagaaaagttccaaaggatgagattaaggcaaaagttgaggaggcagcaagaatccttgaccttgagaaattattagaccgtaagccaaaggctctttcaggtggacagagacagcgagttgccatgggtcgtgcaatcgttcgtaatcctaaggtattccttatggatgagcctttatcaaaccttgatgcaaagcttcgtgtacagatgagatctgagatttcttcattacataacagattaggtgcaacaatcatctacgttacacatgatcagacagaggctatgacacttggaacaagaatcgttgttcttaaagatggtgttatcatgcaggtagacagcccacagaagctttacaatcagccaaacaacctgttcgttgcaggattcatcggatcaccacagatgaactttatagatgctcagtgtgttgttgagggagcaaaggcattccttaaattcgataaataccaggttgaacttccagaggcaaaggctaagaagcttatcgatggcggttatgctggaaagaacgtagtattcggtatcagacctgaggatatctacgattcagcagagcatcttgataaatttgctacatgcaagattgattcagatgttacaggatatgagttacttggtgcagaggtattattatacttcacagttgcaggcgcaaatatgtcagcaagagttgattcagatacaccggctcgttacggtgatcacattgagcttgcatttgatccacacaagattcatgtatttgataaagaaactgaattgacaattaccaactag

SEQ ID NO: 1990 - DNA, 1152 bp, Eubacterium rectale
atgttaagtatagtgtatggcatggtcgaagaaaatctagaagatagggagattagagtaatgagtgaaaagcttaaagtaggtatcctcggtggaacaggaatggtaggacagagatttatttctcttttagagaatcatccatggtttgaggtaacaacaattgcagccagcccaagaagtgcaggcaagacatacgaggacgccgttggtgatagatggaaaatggacacaccaatgcctgaggcagttaagaaaatcatcgtaaagaacgtcaatgaggtagaagaggttgcttcacaggttgacttcgtattctcagccgttgatatgtcaaaggacgagatcaagaagatcgaggaggactacgcaaagacagagactcctgtagtttcaaacaatagtgcccacagatggacacctgatgtgccaatggttgtacctgaaatcaacccacagcacatggaggttatcaaatatcagaaggagcgtctcggtacaaagagaggcttcgtagcagtaaagccaaactgctcaatccagtcatatgctccggttcttacagcatggaaagagtttgagccatatgaggttgttgctacaacatatcaggcaatctcaggtgccggaaagacattcaaggattggcctgagatggttggaaacatcattccattcatcggtggagaggaagaaaaatccgagaaagagccacttcgtctctggggatatgtggatgatgagaagaaacagattgttcctgcagagtcaccggttatcacatgccagtgtatccgtgttcctgtattaaacggtcatacagcagctgtatttgtcaagttcagaaagaaccctacaaaggagcagctcatcgaggcactcgagaagttcagcggagtaccacaggagcttgggcttccaagcgcaccaaagcagttcatcagatactgtgaagaggataatcgtcctcaggttgcacttgatgtggattatgagcatggtatgggaatcaatgtcggacgtctcagagaggatacagtctatgactggaagttcgtcggactctcacacaacacagtacgtggtgcagcaggtggagcagtgctttgtgcagagcttcttaaggcacagggttacatcacaaagaagtag

SEQ ID NO: 1991 - DNA, 3828 bp, Eubacterium rectale
actctcgaattgaaaggagaacatatgagtaacgtacgtcgtgtatatgtagagaaaaaacctgactttgcggtaaaggcaaaggaattaaagcatgagattaaacattatctgggaatcacaactgtggaggcagtacgtgtattaatcagatatgatgtggaaaatatatcagaggagacatacaagaaagccttgtatacagttttctcagagccacctgttgatgatatctatgaggagacatttgactatggtgatgcaaaagtatttactgtagagtttttaccgggacaatttgaccagagagcagattcagccgagcagtgtgtgaagcttctcaatgagaatgaggagccgattatcagaagtgctatcacatatgtgattgagggtgatatcacagatgagcagtttgctgctattaagaagcattgcatcaaccctgttgattcgcgtgctatcggcatggaaaagcctaagacacttgtgcaggagtttgatgatcctgctgatgtcatcatatttgacggcttcaaggatatggcagaggacaagctgaaggagctttatttatcattgaaccttgccatgaccttcaaggattttcttcatatccagaattattttaagaatgaggaaaagcgtgatccttcaatgacagaaatccgtgtgctcgatacatactggtcagatcactgccgtcatacaacattctctacagagcttaagaatgtcaagtttgacgatggcttctaccgcacaccgattgaaaatacctacaaggattatctcaatacattttcaaatatctacaaggacagaaatgacaaatttgtctgcctgatggatcttgcacttcttgccatgaagagattaaaggcagagggcaagcttgatgatcaggaagagtctgatgagatcaacgcatgctctatcgtggtacctgttgaggtggacggaaagacagaggagtggcttgtaaacttcaagaacgagacacacaaccatcctacagagattgagccttttggtggcgctgctacatgccttggcggagcaatccgagatcctctctcaggacgtacatatgtatatcaggcaatgcgtgtaacaggtgcagcagatcctacagtaccggtttcacagacaattgaaggaaaacttccacagaagaagcttgtcagagaagcagctcacggatacagctcatatggaaaccagatcggacttgcaacaggctatgtcaaggaggtttaccatccaaattatgttgcaaagcgtatggagatcggtgcagttatgggtgcggctccaagacgtgctgtccagagacttaactcagatccgggagataaaatcattctcctaggaggacgcacaggacgtgacggaatcggtggtgctacaggttcatcaaaggcacacaatacaaagtctacatcagtatgcggagctgaggtacaaaagggtaatgcacctacagagagaaagcttcagagacttttcagaagagaagaggtcagccatatcatcaagaaatgtaacgatttcggtgccggcggagtttctgttgctatcggagagcttgctgacggacttcgcatagagcttgacaaggtaccaaagaaatacgcaggtcttgacggaacagagattgctatctcagagtcacaggagcgtatggcagttgtagttgcgccttctgatgttgaacagttccttgcatacgcaaaggaggaaaacctcgaggcaacagaggttgcggtagttacagaggatccaagacttgtgcttgagtggagaggcaaagaggtagtaaatatctctcgtgcattccttgatacaaacggagctcatcaggagacagatgttgaggttgagatgccttgcgagagtgacaattatctggacaaaatcagcacacctgctgtagccaagatggttgaggcaggagatatgaagggtgcctgggaggcagagcttgaagaccttaacgtatgctcacagaagggacttgttgagatgttcgacggctctatcggagcaggcagtgtatatatgccatatggtggacgttaccagctcacagagacacagtcaatggttgcaaagcttcctgtattaaagggtaaatgtgatacagtaacaatgatggcttacggcttcgacccatatctttcatcatggagcccataccacggatctatatatgcagtgcttgagtctatctcaagaatcgttgcagcaggcggagattacagcaaaatccgtatgacatatcaggagtacttccgcagaatgaatgaggatccaaagcgttggagccagccgtttgcagcactcctcggagcatatgatgctcagattggcttcggacttccttcaatcggtggaaaggattctatgtcaggtaccttcaatgatattgatgtaccgcctacactcgtatcatttgcagtggatgtggcaaaggaaaaggatatcatcacacctgagctcaagaaagagggcaaccagcttgttctatttacaatagataaggatgagtttgatcttccaaaatatgatcaggttatgacactttatacagcaatcagaaatcttatccaggatggcgcaattgtttcagcatatgcacttgacggaaaaggactcgcagcagcagtatcaaagatggcatttggtaacaagcttggtgtaacaatcgaggatgaggtgacaagcgatacactctttgcacctggctttggtaatatcgtagctgaggttcctgttgatgcactttcaaaggtcagagaagtaattgatgcagcaggtatttcagatgcagcctctgtagtcggctatgtaaacgataagcagactatcgagtgtgacgatatggtgcttcctgttgatgaggctgtcaaggtatggacagcaaagcttgagggcgttttccatacaaaggcaacagacgatacaagcaaggtaaatagcggtctttacgatgcaaagaatatctatgtatgcaagaataaagtggctaagcctacagtatttattccggtattccctggaacaaactgtgagtatgatagtgctaaggcatttgaaagagcaggcgctgacacaatagtcaaggtattcaagaatctcacagcagaggatatccgcgattcggttgatgagtttgtaaaggcaattgacaaatctcagattatcatgttccctggtggattctcagcaggagatgagcctgagggatcagctaaattctttgcaacagcatttagaaatgcaaagatgacagaggctgttgaaaagctcattaatgagagagatggacttgcacttggtatctgtaacggtttccaggcacttatcaagcttggacttgtaccatatggagagatcagacagcaggatgcacagtcacctacactcacatacaatacaatcaaccgtcatatctcaaagatggtatatacaaaggttgtttcaaacaagagcccatggcttgcacaggctaagcttggtcagacctactgcaatccggcctcacatggcgagggacgtttcgtagcaccgaaggagtggcttgataagctctttgaaaacggacaggttgccacacagtatgttgacttggacggaaatgtatcaatggatgaggagtggaacgtaaacggctcatacatgtctattgaaggtatcacatctcctgacggaagaatcctcggcaagatggctcactcagagcgccgcggcgagtctgtagcaatcaatatctacggcgagcaggatatgaagatattcgagagcggtgtgaaatactttaaataa

SEQ ID NO: 1992 - DNA, 1056 bp, Eubacterium rectale
atgaagcaagtacaattcccttgctgcatgggaggtgtgagagtgacagtgaaaaataaatggacaaatatgagcaagaataagagaaacttcatcataacagagctgctacttggagtactacttgtgataggaataggttttatcgcatacaataagctcaatgagaaaccggagcgtattgcagttgtgatggctgatgtggatgaaagccacagtgctgcgtttaaatatggcatgaaaatggcggcctctgagtatggtgtggatgtagttatgataagtaaggaaaatctgaacaatatgtcagatgaaattgatgtcataaagcaggagataaacaaaaaagctgatgcggtcgttttcaagccgacagcagaaaaaatgacagaagaaaaaagccttaatacacttatccggataaataaaaagacaccgataatggttgtcggagaccaggcgggaagcgagagctttaagtcgttaaatacagtggagtttgaccagtacagcatgggtacggaactggcacaaaagcttcttgctgacaacaacggaacactttcaggtaaaaaaataggaatctattgtgaaaacactgaatccgatgcctgtaaaaaacgcattgatggcataaaggatactcttgcggagagcggctgtgttgtgatgtggattgtatcaggtgtttcggataccggggagaaaataaatctgcagtcacagagaaaggttgacatagttcttgcaatagatgatgcaagtgtggttgaggcggcaaaggaagcctctgataataatctgcagggtgcactggtatatgggataggaaactcaacagaagccatatattatctcgattcgggctggacagaggctcttatcacacctgatgaatttgctgccggatacaaaagtgttgtaggactggtcgatatgctgcgtggcagtagaaaatattcagtagaggaaaagccggtatcttaccagcttcttaccagaaaaaatctgtttgatgaagaaaacaagaagcttttgtatgcaatcagccagtag

SEQ ID NO: 1993 - DNA, 1395 bp, Eubacterium rectale
tattggagatgggattgcagcgtgaagagattgaatctatcttatattaatgtaatatgtgtgtttgttttgtcctttgctgttatggagtatgtaaatcttttgattggcagagtgggcggatttccggtgcttgcaggggtgcttgtgtcatattccgttatgagatatggcagttttgcaaggaaaaatatggcatgctacatgggcatctatatactgacatggtttatcggcacggtagtgctctttatctcaaaatactcaggctggggcaatatcaaaaagcttggtccggcgcagtatttcaaggcactgtacggctcaaccctgtcagagatatgggggtatttttttgcaattgtgctcatgctgacagtgattgtttcaatttttccgcttaccgtgataaaaagcaggaaaatatatgcacggtatgtgttgggaaatacgcttttttggacgataatactcataccgcttaggtttatagacaagaaatttgtcaatcacaaggtgatgtggcaggccggctgtatgatggcctttgcagtgtttttgcttgtgctggagcttttcgttgtatacagactggtgaaatacaggtattgcgatgaacatgcagacaggaaagtgcgcattcacagacgcagggttcgaaggaaaaccataaaagctgtaatagtcattgtgccggtcgttgtcattgcaattattgttgtttatacatatttcatgtcgccttcaaacgagccggctgagtatgaaaaggtcgcaagctgtatcacaaatgatgacaggcttgggcctatggtttatgacagtcaggtgtatattccgataaccatagagcttgactatgcagggactggcagtccgcttggctatattgtatacaaggatcaggactatggcagcaggtactatgaggttgcagcatcaaacctcttatatatgaataagaacggtgacgatacatatttacagatgtcgggcaacgcatcaaattcatacaagaagctgtctgtagttgaaaaaagcaattcatggaaggactgcagcgtttttctcatgtgggatgaggagtggcagtcagagtctcgctacagcaaggatgtcacaggctatacggagtgcgatgaggatttcataaaaagtcttgaggatacctttggtgcagtgaaaataaatccggcagacttcaaggactatgatgcctattttacaatagagggctacaaatccatgaaggatgccatagaaagtgacagtcatgtgggcacctgggtgggctgcatactggcaaaagacgataaattttactatggcagctacgacaatgaaatcacaggcggacagcttcagatgctgcgccatgtgctcggcggtaattga

SEQ ID NO: 1994 - DNA, 2052 bp, Eubacterium rectale
tattttatttttgtgggaattattatgagtaatagatttgatgatgaaaacaatatagagatggatataaagaccgcattcgcatcctggggaaagtatgtttttaagtgctttccgcaggaatgccgtttgaggtcttttttatcagaggattcattagatgactcagaagagaaaaatgtggatattataaacaatccgtttatagacagcatggttgacaggaataatctgctgaaggctgttaaacagattgcagagggagaaaaatttgctactgtagtactgcatgccaaggaaggaacagatacctacaggatatcattcaagtcgatttgctttgatgatgatggcagaacagttgaggcaatagggcttgctgagcagcttgatgagcgtcttaacgagagtgagatggtgaatgctttaggaagcaacttcaacagtatctactatgtagatgtagacaacaataagatgtatccgtacaggatgaatccttctgtccgtgctatgtttggagaagtgcttgagtcaaaaccgggctataatgagatgatggaacagtatgtaaatgctatcgtcttagaagaggataagcttcacatgcttttagagacatcaattaataatctgcgcaggcagtttttgataaaggatacctatcagcatgattaccgcatcgtgagggatggacaggtacagtattgcagagcaaagtttgtcaatgtgtctggcgtgggagagctgcacaagatgatagcgggcttttcggatataagcccggagaagcaaagagagcttgagcgtatagcgtatgtggatgcagtgaccggaggcaacaattacgagagttttaaaaagaagctgcgtgacagaaacgtatcaggatatctgatttccatggatattcactccttcaagatagtgaactccatctgtggtgtggcaaagggcgatgaggcgcttagatggatttctgaaaatatacgcggtgttgtaggatataatgacatatcaggtcatataaatgcagacagatttgttattttctttgcggatgacaagataaataaggttatcagaaagatagagaccatcaatttacagcttattaaggtttcagaatccttaaagattccaaagattcagccatactttggtgtgacaaaatgggagccgggcaaaaaggttgaggaagcatacggcgaggccaactttgccaagaatcggatcaaggagcggaaggacgtgctctatcagatatacagtcaggccgatacagaaaggattgtcgaagaaaagcagatggaggataacttctacagggatttaaatgacaatcattttgagatatggtatcagcccaagtatgctccaaagaccaacaagctggtcggtgcagagggacttgtcaggtggagaagagaaaataatgagattattccgccatccaaatttataccgctttttgaaagaaacggcatgattaaggcgcttgatgagtatgtgttccgcgaggtgtgtacacatcagagaagatggcttgatgaagggaaaaaaatagttcctatctcaatcaacctgtccagagcgagcctgtactttgagtctgtggtcaaaagatatcatgatatagcaagaagaatcggcatatacacacatcttgtgcctatagagattacagagagtgcagcggtcgataatgatgaaatcaagagtattgcggataaattccatggcaatggatttccacttttggtggatgattttggctcaggctattcatcacttgttaccctcaatatgaagtgctttgatacactcaaaatcgacaagagcctgattgactatataggagattcaaatggtgagaggctgcttgtgcacacgatagcactggccaaggagctgggaatctgcgtgaccgccgagggtgttgagagtcaggagcaggtagagtttttgaagaatatagactgcgacagtatacagggcttttattattcaaagccactgccgttaacagagtatgagatgcttttggattga

SEQ ID NO: 1995 - DNA, 2421 bp, Eubacterium rectale
atgttaacaccacttagctggttaaaagattatgtagatatagatgtaacaccaaaggagttagaggaaaaattattctcatgtggtttcgaggtggaggaatcatatgaggtgggaaaggatatctcaaacgtagtagtcggccttgtagaaaaatgtgagccgattcctgagacacacctaagcctgtgtcaggtaaatgccggagcacatggcacattccagatctgctgtggagcggacaatgtaaaggcagggggcaaatatcctcttgcacttatcggcgcaacagtatatgccacagcaaaggatcacgttacaatagagggcgtgatggagataaagcagggcaagctgcgtggatatgattcatatggaatgttatgttcaggcgtagagcttggcttaaatgaggacctctatccgggtgcaggctacaacggacttttggttttacctgaggatgctaaggcgggagatgatgtaaaacctatcctcggccttgatgactggatttttgatattgcaatcacagcaaacagacctgactgccagtgtatatatggcatggcaagagaggttgctgctgttttgggaaaagagcttaaggagcctgcacttgactatactgctgatgatgtgaagaaggaaaacttcaaggtttctgtcctggcacaggacatctgccctcgctacacagctcactatgtgcatgatgtaaaaatctccgagtcacctgcatggatgagaaaacgtcttgcacttgtcggaataagctctatctcaaatgtggtagacatcactaactttgttttaaaagagctcggacagccaatgcatgcttttgattattcataccttgagggagatgagattgtagtaagacgtgcaaacgatggagagaaaattgtcacactcgatgagaaggaatttgagttaaacagcaataacctggttatttgtgacggaaagaaggcagttgcgctcgccggtatcatgggcggcttaaactctgagattaacgacggaaccacagaggtgatgtttgagtctgcaaaatttgcaagagacaatatcagaaagagctcacgtgcgttgggacagtcatctgattcgagtgcactttactcaaagggtgtaaacgagtacacaacagccatggctatgaagagagcacttcacctgatggaggagcttggctgtggtaaggtttcttcaactcacgttgaggtgactactggaaattcgcttgagccaaaagagatgaaggtttctattgcaaaggttaatggtgtgcttggaatagaggtacctacagaggatatcgtgagaatactcacaaatttaggctttgcaccggttgtaagcggtgatgagctgacactcatgatccctgcatatcgtgaggatatggaggattatccggatgtggccgaggaggttatccgtatgtatggctatgatcatgtcattcctgcattcatgcctacggcacaggttacactcggaggactcaaccttagacagcagacagagcgcaagataaaagaggtgctctgtgcagcaggcgcgtatgagggaatacattactcattcttctcaccagctgatcttgatttgctcagattcccggaggatgcacctgaaaggcatgctatcaggcttataaacccaatcaatgttgacctctcgcttatgagaacaacacttgcttctgagatgctttatgccatagcaagaaaccagaagaagggtatattggagggaagaatctttgagcttggaaatatctttatcgcaaaggagcttccgcttacagagtatccggatgagagagagacactttgcgcaggcgtattcggtgaggatgaatcattctttactataaagggactggctgagactgtagcagatgcgcttgatgtgaagtttacatacaagccggctcaaaagccattccttcatccgtatcagacagcagaggtattctgtgacggtcaaaaggtcggatatctcggtcaggtaagatatgagatatgcgatgagcttgacatgagagtaccggcatatgtgatggagcttgatttaagagttctttcacagtggtatggaaaggacagagtatttactccaatctcaaaatttgatgatgagaagagagattttgcttttgttgtggacaaggatattacatgtgagcagattgaaaacggtatcagggaagcctgtgattatgtctcagatgttacactgtttgatgtttacgagggtgtacagcttcctccgaataagaagagcatggcgtacagtgtagtatttacaccaaaggatgaggagcttaagactaagaaggtcgagggctttgtaaaggatatacttgctcatcttaaagagactgcaggtatcacacttcgtggttag

SEQ ID NO: 1996 - DNA, 1842 bp, Eubacterium rectale
atgtattcgctgtttgacgcaaaacagctatatatcaggaggaatacaatgaaaaaactgattaatttgatatcagaggaagtgacaaaggcattcgtcagtgcaggatatgacgagaagtacggaaaggttacactttcaaacagaccggacctttgtgagttccagtgtaacggagcaatggcagcggcaaaagagtataagtgtgcaccatttatgatctcggacaaggtagcagcgctccttgagtcagatgagatgtttgagtcagtagaatcagtaaagccgggatttcttaatatcaaaatggataccgcttttctggcaaaatatatgaacgatatgaaggatgacgagggcagatacggcttggagaaggccaaaaagccactcactatagtagtggattacggcggaccaaacgtcgcaaagcctcttcatgtaggacaccttcgttcggcagtaatcggagagagcgttaagcgtatcgcaaagttcatgggacacaatgtgatcggtgatgtgcatctcggtgactggggacttcagatgggacttatcatcacagagcttcgcgagagaaagcctgacctcgtttattttgatgagagctatacaggagagtacccgaaggaggcaccgtttaccatatcagagcttgaggacatctatccgacagccagcggtaagtcaaaatcagatgagagcttcaaggaggcagctcttcttgccacaaaagagcttcagggaggcaggagaggctatcaggcactgctttcacacatcatgaatgtatctgtaacagaccttaagagaaattatgagaatctgaatgttcattttgaactgtggaagggcgagtcggatgcacagccatatgtacctgagatggttgaaatgatgaaggaaaagggttttgcacatatgagcgagggcgctttggttgtggatgtgaaggaggatacagatacaaaggagattccgccatgtatcatcctaaagtctgacggagcttcactttacagcactacagaccttgcaacacttgttatgcgtatgaaggagaacaaccctgaccgtgtgatttatctggcagatgcacgtcagtcaatgcactttatccaggtgttccgctgcgcaagaaagacaggcatagtacctgatactacagagcttgtacatatcggctttggaaccatgaacggtaaggacggcaagcctttcaagacaagagacggtggagtaatgcgtcttgagtacctcctcaaggaaattgacgatgagatgctcaataagattaaggaaaaccagaaggaaaaagagaatttaaatatagacgaggcggaggctgagcagacagccaaaactgtagcgcttgcagcagtcaagtatggtgatttgtctaatcaggcgagcaaggattacatctttgatatcgacagattcacatcctttgagggtaacacaggtccatatatcctttatacaatcgtgcgtatcaagtcaatcctctcaaagtatgaggcaaagggtggcaacatcagcgcactgaaggatgcaatcatgccggcagtcaatgcaggacagaagaatctcatgctctctctggcaaagttcaatgccacaattgagagtgcatacgaggagtctgcaccacacaagatatgtgcatacatctacgagcttgccaacgcattcaacggcttctaccatgacacaaagattctttctgaggagaatgaagaacttaagaagtcatatatttcgctgcttgtgctcacaaaggagatacttgaggcttgtatagatatgcttggattctcagctcctgacaggatgtaa

SEQ ID NO: 1997 - DNA, 996 bp, Eubacterium rectale
atggaattttatgacgagaaaattaaagctcttgccatcgaaatctatgagcttgatgccgaagtatacaagaaattaggctcatccctcggcagggtatttggtggcgagaaggatatatgtatccgtaacatcatggaggatctgcactcaaggcagaacagctcaagaatccgaagcgagcttgccctgataagcaacatggcaagaacaatacctgatcacgatacaaggcatgatatcatggtcagatacaacaacatagtagaggagatagcggagctcccgacaggctttgccgacggagatatcctcgatccaaagatagcggatttaaataccgtaaacctgaaggatcgtttcaagacgggcgatcatctgattatctgtataggacgttcctgcggatgtggtggaaatgagattggatttgcacttgcagacaagcttcgtatgaatttctatgatgtgtctgtcatgaatgaggtgttcagacagaaggatggagaggaagcagcccaggctacagctaccttccagaaaaaagagcgaatgggaatcaaaaagcgcataaaagcttttaagaaataccacggactttcatcagaggatgtgcttttctttgatacaagcaagttccttgtagagaaggcaaagcaggaggacttcattgttatgggacgttttgcagatgcaattctgacaaacaatcatattcctcacataagtatttttatcacagcaccggagaagagaagaatccagcgtttccttgagataaataagaatgtgactccgaaccaggcaaagaaatggatagaatctgaggataagagacatctgaagacctacaaattctataccggcagaaagtggagcaaggcaagtaactatgatatctgtatcaacagtgccagctacggtatcaagggctcaatagagcttatcatccgtatgctccagctcgatgaccgcgtgaagcagctgattgagtaa

SEQ ID NO: 1998 - DNA, 1398 bp, Eubacterium rectale
aaatgtcatacacagttaaaggagaacagcaaaatgataaatattggtgaagtaattgagaccaatgacatggtggagaaggaaaatcttgacgtgcgtacaatcacactcggtatcagcctgctcgactgtatagactcagaccttgcaaaggtaaatgagaatatctacaacaagattacaacacttgcaaagaatcttgtatcaacaggaaaagagatagagaacaactactgtatccctatcgtaaacaaacgtatttcagttacacctatcgcccttgtcggcggtgcggcctgcaagagctcagaggattttgttaccatagcaaagacacttgacagagctgccaaagaggtaggtgtcaacttcatcggtggatactcagcacttgtgtcaaagggcatgacaaaagcggatgagcttttaatcaaatctatccctcaggcaatgcttgagacagacctggtatgcagctctgtaaatgttggctctacaaaaaccggaatcaacatggatgcagtaaagctgattggcgagatgataaaggagacagcagaggtgacaaagcaccttcctgtatcaggctgtgccaagtttgtagtattctgcaacgctcctgatgacaatccgtttatggcaggagccttccatggtgtgacagaggcagatgccatcatcaatgtaggtgtcagcggaccgggagtagtaaagactgctcttgaaaaggtaagaggcgagaattttgaggtgctctgtgagacaatcaagaagacagctttcaaggttacacgagtaggacagcttgtggcaaaggaggcttcaaagaagcttggagtgccatttggaatcatagacctttcacttgcacctacaccggctatcggagactctgtagctgatattctctgtgagataggcttagagagagccggagctccgggaacaacagcagcacttgcactcttaaacgatcaggtgaaaaagggcggtatcatggcatcctcatatgtcggcggactctcaggtgcctttattcctgtatcagaggatcagggaatgatagatgccgtaaacgatggtgcactcactctcgaaaagcttgaggctatgacctgtgtgtgctcagtgggacttgacatgattgcaatcccgggcgatacaaaggccaccacaatttcaggaattatcgcagatgagatggctatcggtatgataaatcaaaagacaacagcctgcagactgcttccagcaatcggaaaggatgtaggtgatgtggtagaaatcggaggactccttggaagtgcaccggttatgccggtaaacagattctcttgtgatgcatttgtaaaccgtggaggaagaatcccggcacctattcacagctttaaaaattag

SEQ ID NO: 1999 - DNA, 2175 bp, Eubacterium rectale
catgtaccatcatacaaatatagtaagggagcaaagagcaatatgtatatgtggagagagcgcagtaaagaagaaaagcatgaggatgtagtaaatacaggcctgctgccgcttgatgtggtagagggatttaagatacgtccgggctttttcagaatgtacggagcgtgcgtggcatcgaacggagtgagctttactatcaattcccatggggcaacgaggtgtactcttttattgttcaagccacaggcaccaaagccgtatgcgaggattccgtttcctgattcatataggataggagatacctactccatgcttgtttttgatataaagccggatgaatttgagtatgcattttcgtttgacggaccatatgagccggcaaagggacttttgtttaacgaggaaaatgtcattttagacccatattccagagcggtcactggacagcgaaaatggggagaaaagcctgagggaggcaaggattttgagtacagagccagagttgtaaaaagcaactttgactggggcaacataaagcagcttgagcaaccctttgaggaccttgtgatttatgagacacatgtgaggggctatacaaaggataagtcctctggagtcagtgcactgggtacatttgccggtttgaaggataagattccgtatcttaaggaccttggaataaatgcagtggagctcatgccgatttttgagtttgatgagatggagagcgcgagagtggtcgatggtgtgcagctttacaattactggggctacaacacagtatcattttttgcaccgaataccagctatgccttcaacgaggagcacaaccacgagggagacgagctgaaatcgctgataaaggctttaaaggaaaatggcatagaggtcattcttgatgtggtgttcaaccataccgctgagggaaatgagatgggaccgtgcttctccttcaagggaatagacaataacgtgtactatatgcttacaccggatgcacactactacaatttcagtggctgtggaaacgttatgaactgtaatcatcctgttgtgcgcagctttatcatagactgtctgagacactgggccattgagtacagagtggatggcttcagatttgacctggcttccattctcggaagagaccaaaacggtgcacctatggccaatccgccgatccttgagtcgctggcattcgacccggtacttggcaagatgaagctcatcgcagaggcctgggatgcaggcggactgtatcaggtgggaagcttcccgtcatggaacagatgggctgagtggaacggcagatacagggatgacatgagaagctttttaaagggcgatgacggtatggcgggaaatgccatcacacgtatcaccggctcacgcgacctttacagcccggagagcagaggacacaaggcatcagtcaatttcatgacctgtcatgatggctttacactgtatgacctttactcatacaatgaaaagcacaatgagaaaaacggctggaataacacagacggagacaacaacggacatagctggaactgtggcgcagagggtgagacagacgatccaaatgtaaacggacttagaaggcgccttataaagaatgcatttgcagcacttttgtgcagccgtggcccggctatgttttttgcgggcgatgagttctgtaacacccagtttggaaacaacaatgcgtattgtcaggacaatatcatttcatggctcgactggagcaggcttgaggaattcaaggaaatccatgatttcgtgcgtcatatgattcagttcaggaaagagcatcctatactcagaaagatgacaaagccttcatcctgccagtttccggaaatcagtgtgcacaacggtacaccgttcaatgcctcaacggattacaagacaaagcttatcggcatcatgtatgccggaagaaatgaggaggacacggaggatgatattgtattctattgcatgaacgcatattgggagccgcttgtgatgcagcttccggtgcttccgaacggaaaacactggcatgtggacaccaacaccaatgcagagtattttgacggagaggacttcacggaaaagacagagcttttgggtgtcaacaccataagagttcctgcgagaaccacgataatacttgtggcagagtaa

SEQ ID NO: 2000 - DNA, 1815 bp, Eubacterium rectale
aaatataaggagtataaaatggcagaatcaatgcagggcttacatagaagccatagatgtacagaggtatcaaatgccaatatcggtgagaaggttaccgtcatgggctgggtacagaagagaagaaatttaggaagtctcattttcgtagatttaagagacagaagcggaatacttcagatagtattcggtgaggaaaatgtaggtgcagagggctttgaaaaggcaggcaccttaagaagtgagttcgtcatcgcagttgagggaactgtccagaagagaacagctgctgtcaatgagaacttaaagacaggtgatatcgaggttatcgctacatcaatcagagtgctttcagaggcacagacacctccattccagattgaggagaattcaaagaccagcgaggacatcagacttaaataccgttatctggatcttcgtcgtcctgatatccagagaaatctcatgctcagaagcaatgtgcttcgcgtgatgcgtgactttatggcaaacgagggctttttggagatagagacaccaatcctttgcaagtctacaccggagggcgccagagactatctcgtgccaagccgtatacaccacggacatttttatgcgcttccacagtcaccacagctctttaagcagcttctgatggcttcaggctatgacagatatttccagattgcacgatgcttccgtgatgaggatctgcgtgcagacagacagcctgagtttacacaggccgatatggagctttcattcgtagatatcgatgatgtaatcgaggtaaatgagagactgttaaagcacctttttaaagaggtcataaatgtggatgttgagattccgtttaagcgtatgccttggcaggaggctatggacagatttggttctgacaagcctgatacacgctttggtatggagctttgcgatgtttcggaagtggtaaaggactgtggctttggagtattcacaggagctcttgaaaacggtggctctgtccgtggtatcaatgtagagggacaggcaaagatgcctcgtaagaagattgacaagcttgtagagcacgcaaagggctgtggagcaaagggacttgcttatctgtgcatcaatgaggatggcacatacaagtcatcatttgccaagtttatgacagaagctgagcttgatgcacttgttgcaaagatgaacggaaagccgggagatttactcctttttgcagctgataagaataaaatcgtatggaatgtacttggagcgcttcgtctcatgctcggagctgagcttggcctgattgatgagaacaagtacaatttcctctgggtaactgagttcccactccttgagtggtctgatgaggaaaacagatttatggcaatgcatcatccattcactatgcctatggaggaggattgggacaagatagactcagatccgggcgcagttcgtgcaaaggcatatgatatcgtactcaatggtacagagctcggtggaggttcagtgcgtatccatcaggatgacatccaggagaagatgtttgaggtgcttggtttcacaaaggagcgtgcacatgagcagtttgggttcctgcttgatgcattctcatatggtgtaccgccacacgcaggacttgccttcggtgttgaccgtatttgcatgcatatgctgcatacagacaatatcaaggaggttattgcattccctaaggtaaaggacgcttcagacctcatgtcagaggcacccggaactgtagatccaaagcagcttgatgagcttggaatagctgtagctgcagaggaagatgaggaataa

SEQ ID NO: 2001 - DNA, 2643 bp, unclassified Clostridiales
atgaaacgtgcagtcaccttgctgctggccgttattatggtcctaagcattctgcccatttctcaatcaagcccgcagcaaagcgccgattacctgctgcttgaagattttgaaagcggcatagacggttattacggcggcgatttaagccaatacggcctggcattgcccaattttgttgctcagccaagcggccattcgggaaacggcatcttttcggttatgacgcagaacggccagtggtgcgaaaccttgcagagcaccgatacggcccttgtccggaattttgaagccaatgcggatgattacggctattttatgttctatatagccggtattcagacccttccgctcgaacttacggtaacgctcaggagcagtacgcagagatattactttaccgctccggacgccgcgctttacagcctggacggcgcaagccagacagtaaccgggggcaatgcctcaggcggaggcgaaaacacctccataaccatccccgccggattcagcggctatgtggtttacagtctggatatgtcagcagtaaattttgatgtaaccaacatcgtgctggacgtgcgcaccaacggagcgctcaaggatgattcctacggctttgattccttctacttaactaattcaccaaaggaaataatggatatgtacaatcaaaacaatcctgatgacgacggcaataaccaatatatgctgctggaagattttgaaagcttcgccgcagacggcactatgcccgcgggctattcttcctctgatcttaccagtttcggcgtgcctgccgtggccgaatatcaaattaaaaaaagcggacattcgggaaacggaatagcctcggtaatgcctgcaaattcccagtggtgcgaagtgctgctctgcggtcagaatacttccctagtgaaccgctttaaagcaaatgcagccgattatcagtattttatgttctactattcgggcatccccggaattgaaaccaatttaactgtcactctccgcggcgcttcctcccgtatttatcttacagcggataccgtatctctttacacgcttgaaggagaaagccttgaagttgtaggcggagacaagtcaagctcaggagtggctaattcctcctttgcggtttccgccagcttcaagggctatgtcgtatttaagctggatatgtccaaagtggattttgagattgccacaatagggctggacatgcgctgcacaggagcattcatgggggattcttactgctttgattccttctaccttacaaacgacccgcagcttatcatagatttacccaatgacggcggcataacgggtgaggaaagcaatattcccgatataccggacgatatagacgatgctgtagcccaagcaaaagctatgtttgattcgttattagattatacacccgaaataacatatacccccgaatatgacccggcaggctacgatggaataaaatgtttttactatgaaagcgtaaacgaccatcgcggtcaggctacgcgcgcctttgcatacataggctaccctgaaggcgccagcgaggatgaacccgtacccgctgtactgctgctgcatggttcgggaggatatccctttgctgaatggataaaaatctggaatgaccggggatatgcggctatcgccatccagcacggcgcgctgatgcccgacggcaaaggcggatggacgcaggatcctcagggaggagccactgaaggctacggaacgggtaatctgccccttgagcggcaatggctctatcatgccgtggccaaaagcatcctggcgcacaacatcctgcgtagcgacccattaattgacagcgataaaataggcgtaaccggaatatcggccggaggcgtagtagtggccaaccttataggatatgacagccgttttgccttcgcagtacccgtatatctatttggttatatgcacgaatcattatcggacagacgtgagcgctatgacgaggctacctataagctctgggaaggttcagtacgctttgacaatgttaaaatgcccgttctcatcctaaacagcgacagcgatttttcagccagcgtaaacaccagcagccgcagctttgataatttggaaaacgcccagatatgcataaagcacggcttgctgcatggtcatatagaaggctgggccccggcggaaatctatcgcttcgccgacagcattgtaaaagacggagagccccttgcctattttacagagcagccaacggccggtatgggaaatgatttgaatctagcgcttgacgtgccaaatgacgcagaggacgtcagcataaccctttattatactactgaacctctgagctataacgaccaaaaccagcttgaacaaacatggctgtctgttcaaggaacatattccaacggcaaagtagaggttaaggttcctgaagacgcaagcgtatattatataagcgtatgcactaaaactgcttcaggcaattattattcctcttccagactggtcggagcgcctcatgacgactatgatcagggcggggattcatccgcgctgccattagccttagcaggagccgccggtttaactggcgctctgtcagttgcaaccaagaaacgcaaaaaatttaattaa

SEQ ID NO: 2002 - DNA, 1194 bp, unclassified Clostridiales
atgagcagcagaaataaaaaaatgcagactccggctggagtatatgacttccttccagatgaatgcaggctgagtacatatctgaaacacaatattttatcagaggctcaaagctggggatatgagcgtatagaaactccgtccattgaatatctggacgtatatcttactaccaacgcagtggcgtccataagggatatttttaagtttaccgattcttcaggccgtcttttggcgctcaggccggatataactacatcagtagcgagggcggtggccgtaaaaatgaaagaggggcccttcccgctccgcttgtgctatcagggcgaggtgttttccttcaacgctcaggcgggcgggttcacccagcgcacgcaggcgggtgtagaattgataggagggtcgggctccttttatgacgccgaggttatagctcttgccatttcctctcttttaagggcgggggtaaaggatttccaaatagaaatagggcaggtggatttttttaagggtcttatgctggaggcgggccttaacgatgagcaggcggaggaagtgcgcctgctggtggagcagaaaaatatgctgggcatagaattgctgcttgaaaagcttcctgttagccagccgctgcgcaaagttatttccgagctgccttatttgtttggagatgtaagcgtattgagctcggcgctgaatatgtgcccccatcccaaatgccgggaggccgtggataatctgaaggaaatatatgaatatttaaaagcatattcctttgaaaaataccttacctttgatttgggtatggtgcagagccttaattattatacgggggttattttccgaggcatatgtccgggagtcggcgagccggtgatgaacgggggccggtatgacgggctgcttgaagagtttggcgcgcagctttgcgctaccggctttgccgttgaggtgactaagcttataaaagcgtatgctttccatccggctgaagagggagaaaaacaggcagaggtgctttgcgatgcggagaattatgctgaagcggtgaaattatgcgcccagcttcgcagccagggcaagcaggccgtgcttaatttacagagcggcaatacaggcttatatgcggaaaacaactgcgctgaaggcgaaatatacatggccggcagcgaaaataccgagcgggttaaataa

SEQ ID NO: 2003 - DNA, 3579 bp, unclassified Clostridiales
ttgtttgaattaaacaattttgattccatacaaatcggccttgcgtctcctgaaaagatacgcgaatggtcttcaggcgaggtgaaaaagcctgaaacaatcaattaccgcactcttaagcccgaacgggacggcctgttctgcgaacgcatattcgggcctacccgcgactgggaatgcgcctgcggcaaatataagcggggcgcgcggtataagggcctggtctgcgaccgctgcggcgttgaagtaacccgctccaaggtgcgccgcgagcgcatggggcatatagagctggcggcccccgtttcgcatatatggtattttaagggcatacccagccgtatgggccttttgctcgaccttactccgaaggaactggaaaaggtgctgtattttgcggcgtatatagttattgagccgggggataccgaccttaaggctaagcagatactgtccgagagcgagtaccgcgagaccatagaaaaattcggccccaattccttcagagtaggtatgggcgccgaggccataaaggaatttttaagagctatcaatcttgacgagctgtccgacgagcttaagcacgaattggaaaacgcaaacgtaggacagaagcgggtaaggataataaagcgcctggaggtagtggaagccttccgcaaatcgggcaataagcctgaatggatgataatggacgccgtgcccgtaattccgcccgaaatacggcccatggtgcagctggacggcggccgttttgccaccagcgaccttaacgacctttaccgcagggtaataaaccgtaataacaggcttaaaaagctgctcgaattaggcgcgcctgatattatagtgcgcaacgaaaagcgcatgcttcaggaggctgtagatgcgcttatagataacggccgccgcggccgtcctgttaccggacctggcaaccgtcctttaaaatccctgtctgatatgctcaggggcaagcaggggcgtttccgccagaaccttctgggcaagcgcgtggactattcgggccgttcggttatagttgtaggccctgaactgaaaatgtatcagtgcggccttcccaaggagatggctttagagctgttcaagccctttgttataaagcggctggtggaattgggcctggctcacaatataaagagcgccaagaggcttatagagcgcggacgcacagaagtctgggacgtgctggaagaggttatagtccagcatcccgtcctgcttaaccgcgcgcctactctgcaccgcctcggcattcaggcctttgagccggtgctggtagagggcagggcaattaaactgcatccgctggtgtgtactgcctttaacgccgactttgacggcgaccagatgcctgtgcatgtgcccctttcttcagaggctcaggctgaagcaagatttttgatgctggcctcaaataatatacttaagcctgccgacggccggcctgttgtagtgcctacgcaggatatgattataggtgtgtattaccttaccatagaggaaccctccctggcccgtccggagagcatatattccaatattgacgaagcgattatggcgtatcagacgggcaatctgccccttcatgccaagaccaatatccgcataagcgccgtagtcaacggaaaggaatatacaaaggtccttaaaaccaccgtgggccgcgccatatttaatcaggccgtgccccaggaccttggctttgtggaccgttcaatccccggcaatgaggtagagctggagatagataaattagtaggcaaatccgagctgggacagataatttcccattgctttgccagacatggagcggcccgcacggcggaggtgcttgaccgcattaagcgcctgggctttaattatgcgacaaagggcgccataacggtaggcgttaaggacgccgtagtgccgtctgaaaagaaagtgcttatcaaggaggccgaagataaggtagcgcttattaaccgcaagtaccgccgcggtcttactaccgatgaggaacgctaccgcaatgttatagccgtctggaaagagactactgaaaatgtgcttaatgcgctgatgacctcctttgacgaccttaacccgataaacatgatgattaaatcgggagcacgcggtaataaggaccagattcgtcagcttgccggcatgcgcggccttatggccgacccgtcgggccgtactatagaaattcctattaaagctaacttccgtgagggcctgaccgttttggacttcttcatttcttcccacggtacccgcaaaggtctggccgataccgctctgcgtaccgctgactcaggttatcttacccgccgtctggtggacgtgtgccaggatgttattgttcgtgaggacgactgccaggtaactcatccttccctgagcactcccaagggcgtctgggtagaagatatagtttacgaaaaggcggttatagagcctcttaagagccgtattaagggccgtgtttcagtggatgaattaaagcatcctgaaacaggtgaaatactggtgcatgccaatgagctgataaccgaggaaatagccgacgctatagtcgcggcaggttataagcgggttcagatacgttcggtattcacctgccgctcggataacggcgtgtgcgccaagtgctacggagcggatatgactactaataaattggtgagccagggcgaggccgtaggcataatcgcggctcagtccataggcgagccgggtacccagctgacaatgcgtaccttccataccggcggtgttgcaggaagcgatataactcagggtctgccgagggttgaagagatatttgaggcccgcaagcctaagacgctggctatactttcagatatagccggcacggtcaaggttactacaaagggcaagggccagtatcagataacggtaacggccgaggacggcgatgtccgtacctacaattcaggctttaacgtaattccctgcgtagcagacggcgatgtggttgccgagggagacgagctcacgcccggttccctcaacccgcacgaccttttgaggataaagggtgtcactcagctccagaattatctcctgcgcgaagtgcagacggtttataagcgtcagagcgttgaaataggagataagcatatagagcttatagtgcgccagatgctgcgcaaagtgcgcatagaggattcgggggataccgatctcctgccgggagaaatggtagatatttataaggttgaggccataaacgccaaggttgccgccgagggcggcgcaccggcgacctcccgccgtatcctgctgggaataaccaaggcttcgcttgctaccgaatccttcctttcggccgcatccttccaggagaccacccgcgtgctcaccgaagctgccatcaaaggcaagacagataccctttcaggcttgaaggaaaacgtcatgataggtaagctcattcctgcgggtacaggcgctaaacgctataaaaacgtggtgctggatgtggagcagcctcctgttgaagcggaggagcagagggaagagccggctgaaataatactttaa

SEQ ID NO: 2004 - DNA, 1908 bp, unclassified Clostridiales
atgatggatttgtttgatgcggaaaaagaaaaggaacaggcggaacaaagacgaaaaaagaagctttgcgctatggtcagggaggaatttgagcggcgtgccgtacagcggcggccctttgaacttcaatggcagctcaatatgaatttcatgctgggcaaccagtattatgaaatagcttcactgtcgggcgacttgtacgaaaccgaaagagaatatccctggcaggagcgggaggtctataaccatatcgctcctattatggaatcgcgcctggccaaattgacaagggtacgcccgcagatgttagtccggcctgctacgtcggacgaagaagacgtacagagcgctaaagtctgtacggcgctggtaaaatcctgcttttcaagactggccatgtctgaaaaactggacgaggcggctatgtggtctgaaatctgcggcacggttttttataaaagcgtgtggtctgattctaagggcattcctgtggggtctgatgagagcggacagctgcgccagggggatatagaaacaaccgtatgtccaccgtatgaaatatatcccgattcgcccggacggacggatgtggacagatgtgaaagcataatacatgcgcgggcgtattcttctggcgaagttgaacgcatatggggcataaggccggagggcggcaaggtaaaggtttacggaatctcggctgaaaacggaggccttatgccgggcagttccgaactggaggacggcgtattagtgactgagtattatgagatgccttcggctgaatttaataaagggcggctgcttataacctgcggggatatccttctttacgagggggatttaccctataaaatcggcgagggcaatgagcgggggataccgtttatccgccaggtttcaatttcccggcccggctgcttctggggaatttctatcatagaacgctgtattcccattcagagggcatataatgctgttaaaaaccgcaaacatgaattcttgaatcgtgcggcagtaggagtgttggcggttgaagaaggttcagtggatttggagaatctggaactggaagggctggcgcccggcaaattgctggtataccgccagggcaccaatataccggctttccttcccggcggcaatcttccgggagagtttattcaggaggaaagcgaactgcttcaggaatttgaaatgatttcgggggtttccgagatgatgaggcgttcgtatgcgggggcaaatatcagcagcggtacggcgctgtcccttttgagcgagcaggacgatacccgcctttcggttactgccgagcatatacgctcggctatgcgctctctggctaaaatctggctgaggctgtataagcagtttgcgggcagcgcgcgcatagatagagttgtcggggcgaacggccaggtcagtgcgctgtattggaaggccagtcagataaccagtgatgacgtagtgcatgaaacggaaaacgagctgtcgcaatctctctctcagcgccggcagatgatatttgaccttatagccagaggcatctttacttctccgcagggcggcctgagcgagcgcactaaagcgcggctgcttaatatgcttggcctgggcgactgggaaaatgccgcggatatgcctgaaatgcagatggaaagggcgcagcgggagaatttccgcatgagtgaaggcgaagcggctgccgtggaaaattatgatgaccatgaggttcacgagacagagcatattaaatttatgctgtctgagcaatatgaggaactgagcgctaaaaagccagaatgggccgctttgttccaggagcatttgaccgctcatcagattttgttgaatggaggaatttcgaatgcagatacgcttgaacagggaacaacccgtgaataa

SEQ ID NO: 2005 - DNA, 1890 bp, unclassified Clostridiales
atgcctcccatccgtgcagtcggaaaacccaaaaacgccggcgcaaccttaaagcgcctgctgagctatatgcttaaaactaaatggatgcttgtagccgtatttatatttgtggtctttacttctcttgcaggcgttataggcacttccatgctggatcctattatcaatgaaacaatactgcctctggtaggcacttcgcctgtatttgaagatttcctgccgctgctgagaatgataatattattggcgatagtttatgttataggcgcgttaagctcttatttccagcagttccttatgatacgcatatctaacagggctttaaataacatcaggagagatttgttcaaccgccttgaggatctgcccataaaatactttgacacgcatacccacggcgaaataatgagccgctttaccaacgacgtggatactgtgcgcgaggctatgagccagggcataacccagcttatgtccagcgctataaccataaccgctacttttatcgccatgctaataaaaagcccgctgctcactatgtttataatcttaatgcttattgtgatgctgttcataaccaaattcatcggcgcgcgttcatctaaaaatttccgtctccagcaaaaagctcttgggcgcgccaatggatacattgaggaaatgatagaagggcaaaaggtagtcaaggtattttgtcatgaggatgttgtggaaggcgaatttgcgcagcttaatgaaaatcttcgtcaagccgctacaagcgccaatacctatgcgagcattataatgcctattatgggcaacctgtcttatgtaaattatgcgctcatatcagccttgggcgcctggatgactatttccggcataggcggaatggatataggcaagctggccaccttcctccaatattcccgctccttctcccagcccataacccagataagcatgctctttaattccatactggcctctcttgccggtgcggaaagaatttttgaggttatagacagcgaacctgaacaggacggcggctatgttactcttgtcaacgctcaatatgcgcctgacggcagtttgacggaaagtgacaacagaacggggctatgggcctggaagcagccccaaaatggcaactcccccatttatactcagctcagaggcgatgtgcgcttaaacagcgtcacttttgcctatgaacctgaaaagattgtactgcacgatataagcctgtacgccaagcccggccagaagatagcttttgtcgggtcaaccggcgcgggcaagacaaccataaccaatcttataaaccgtttttatgagattaatgaggggcagattctttacgatgggattgatataacccagattaaaaaggacgacctgcgcaggagcctggctcttgttttgcaggatacgcatctttttaccggcactgtgcgcgaaaatatccgctacggccgattggactctactgataaggaagtagaagaagcggccagactggccaatgccgatacatttataaagcacctgcccgacggctatgatactgtcctgacctcggacggctccaatctgagccagggacagcgccagcttatagccatagcccgtgcggccgtagccgacccgcccgttttaatcctggatgaagctaccagcagcatagatacacgcacagagcgtcttatcgaattgggcatggataagcttatgcacggacgtacagtatttgtcattgcgcaccgtctgtccacagtacggaacgcagacgccattatggtgctggaaaacggcgaaataatagagcgcggcagccatgatgagctaattgcccaaaagggcaaatattatcagttgtatacagggcagtttgaattgtcctga

SEQ ID NO: 2006 - DNA, 1998 bp, unclassified Clostridiales
atgaaaagaatattagaaaatacggaggaaatattaaattttaacatcagcggatttcatcaatatgttttgactgaaccggtgcatttaagctttgtcagccgtaatctgtgtgaaatgctttgtattgctcaggaagagctattaagcgaagataaagatttatatctgccgtttgtgcatcccgccgatagggaaagctattcagagtttttgcacagaattaaatcagaagaacaggagcttacggcggaataccgcataattaaaaaagacggttcggttatatatttaaaggatacgatgacctcaaagcgccttgacggcgggataatggctggttattcagttctgaccgatataaccaagctgaaaactgagaataatgatctgcgtttcctaaatgatactattccctgcggatttttaaaatatacctgtgaaaagcagcccagagtcacctatattaacgaccgcatgctgaagatattgaggttccctgaaatcaaagacggagagacggattatctggagctttgcaaggaaaatatttttcttatgattcctatggaggaaaggcgccgcttcactctttatctgaaccgcgtttataccgcaggcgtgcccatggccggggaaatacccgttctgcgctgcgacggcaccagagcgtatattttcggctgggttacgaaatgcgtcaatgaacagggcgtggaggaattccagagcgtgtgcatggatataacccaaaggcaccatgtaaagaaagctaatgaaaccaagcgttatattaaggctttgagcgacgtttacgataaaatatttgaatatgattttgcaaacaataccgtcaaatgcctgtatgcccaggattattccatgttcaggtggattgaaaatatcccaatgcagatggaggaggctaccgaaaaatggatagccggcaatgtggtggaggaggaacgggagagggtaagttcctttttccgcgccttttgccagaagagcttaaagctgacttcctccatgcccccgcagatagaatacagggcacgttcttccaagggggatatcaagctttacaggggtatctttttaaagatggatgataatataagcctgtattgctgccggaacgtacctgatttggaagaagcggactttttgagaaatgaaaacatctctttaaaagagaatatgcatgaattagttatgcgctttaaggacggtattgccgcttttgaggtgataaacgagcaggtaacgcctctttatgccagcgataacgtctgtgagttttttggttatactaaagatgaatggctgcgcttaatgaaagtgagcacgccgatgaaaagctttgtatcgcatagtaagtttgcatacgaggattttgtggagctattgcagaatggagaggcagaatatacttattttgatttgaatactcagaccgagcggcgcattaaagctatctgttcatctaagtcgcccggcggttcgtcgcccaggtatgtgatgctgtataatgtagacgatacccctcttgaaatacagccgtcaagggaacgccgggtttctattcgcacctttggatattttgatgtttttgtaaacggcaagcccatagctttccgcaataagaaatccaaggaattgttcgcgctgctgaccgaccgccgcggcgggtttataacctcagaggaggccataggctttttgtgggaggatgagcctgtaagccctgtaacgctggctaggtaccgcaaggttgcgttaaggctcaaaaatattctggaggagtatggcatttcggatgtggttgagtcagtagacggaaagcgcaggattgttccggaaaaggtgcagtgcgacctttacgattatctttcgggaaaggaagagtatgcccagcttttcaaaggaagctatctgaccaattacagctggagtgaaaatactttggctgaattgacaggcaaaattatatattaa

SEQ ID NO: 2007 - DNA, 1188 bp, unclassified Clostridiales
gtgcgcaaaggatttgaggatgctcaagggcatataaaagcggccaatataagcgccgtgcccgaaaaacctgtgctgttggggcctgattcgggctgggtgcgcagtgaaagcaatcttataaccaacttttacagcatgtaccagccggaggttgtatatgtgcccgaatgggatgacggggaaggctatccctatttaatgtggttttttgcctgggcatataatcaggagaatgagcctcagggggaatatccgggctatccgggcggggacgcgatttttctggcccgtgccaaagcgctggaggggccgtgggaaatatattctatggattataggacaggcaaaaatttctgggacaaagagcagaatccgttttactggtacccggttatcacatgtcaggacgtttggtatgattcctggcatgcgggggacccgtcggtagtctatcatgaaggcgtattttatatggcctattctgctatgggatgcgatgaggatatgatcccttctcattacgatggtgactctgacggcaatgcctcctgtattatgggagcagtttcaactgacggcattaactggacgcgctctgaaaagcctttaataatctgggagcatgaaaagggatatgatgaaaaggcagacccgcgcaattatatgggagggcatcagcggcccagccttatgtacgaggacggaaaatggaagatgtggtacgactatcacggcaatttgataggctacgctgaaaatactggcgactttatggacgccgcaggctggcgggagctttactgcaatgaccggccattaattaagggcgtggattttgacgtagttaaaattggcgaagtgtactatgcttacggcgacccgtttttaagctggtacggtatcaatgacgatactctgcctgattatcctgaacctaacgggagctggaataagcgccagatagttgaatatcgttctgatgacggcatcagctggaaagttacgggctggttcaggccggacgaggggtatggagccaatcagataccccaggtgtttttagaccataaaaacagccgggtatgtttattttatgccactcagcgcggctgtaaattttctgacgattacgattggcgctgggataatatccgtatgatgtataaagatataaaattgttttga

SEQ ID NO: 2008 - DNA, 2124 bp, unclassified Clostridiales
ggctcaggcaaaaccagggttttgacgcacagggtagtgcatcttataaaggatttagctgttccgccctggaacatactggccatcacttttaccaataaggccgcgggtgaaatgaaggagcgcataaacgacatgtgcgggtacgagggggaaggcgtgtgggtctctacctttcattccatgtgcgtgcggatattgaaaactgatatacacaacataggctatgacaaaaatttcagcatatatgatgaggacgactccctaagggtgataaccgaaatccttaaggagaaaaatatagaggattttaagcccaaggcgtttaagggagctatcagttcggctaaaaacaaaatgaccccctacgaatatataatggagcgcaaaaataagggctacggcgaatttgcagatttgctgcccgatatatacctggaatatgaacgcaggcttaagaagaataacgctttggattttgacgatttgcttctgcgcaccatagagctttttgaaaaatgtccgggcgtgctggaaaaatatcagcgccgctttaaatatataatggtggacgaataccaggacaccaactacgcgcagtatatccttgttaaaatgctgggagggtattatcataacgtatgcgttgtgggagacgacgaccagagcatttacggatggcggggcgctgatataagcaatatacgcaattttgaaaaggattataaggacgctaaggttataaagctggagcagaattaccgttccactaacaatattcttaaagcagccaatgcggttataagaaataacgccgaccgcaaggaaaaaactctctggtctgataaggaggacggcgaaaagataactcttgcccggctgaacgatgagaaagccgaggcgggctatgtttcgggcattatatccgagcaggtcaaaaaaggcgcgaaatattcggattacgctattctgtaccgtataaattctgtgagccgaaactttgaagaagcgcttgcgggaaggggaattccttacaggatttacggcggccagcgcttttacgaccgcaaggaaattaaagacgctttagcgtatatgaaattggtgcttaatcctaatgacgaggtcgcgcttaagcgcattgtaaatgtaccgcggcggggcataggcacagttaccatggaggaaatagagagcatagccagggaaaatgaggacagcattttcggagtgatgctggaggccgagcaatacggcctggagcctaagctgcgccgtaaatttacacagtttgtggatttaatgcaggaattaatcgtacagagtgccctgcttcccttaggggattacatagaatatatgtttacccttaccgggctggttgcccagtatgaaaaggacaagagcgaagaagcgcaggcgagaattgataacctgcatgaaatgataagcgcggcgcggcagttttccgctcagaatccgggaagcacccttgaagattatatggagcatgtttctttagttaccgaattggaggaacaggattcttccaccggcaggggcgcggttaatttaatgaccctgcacagcgcaaagggcctggaatttgatacggtttttcttgcggccatggaggacggaatttttcctttgagccgtgcgatttatgagccttctgaaatggaggaggagcgcaggctttgttatgtgggcattacaagggctatgcgcaagctttatatcacgggtgcggaaaaccgctttaattaccgtgaaaaggcggaggctataccttcgcggtttataagagagatacctgacgagcttattttaaggcagggcaggccttccctgggcgcgggggcttttaaccgccgcaggcaggagagcgtgcgtcccagctataatatgggcgcgctgggcgtgggcggcggcgcgcagcagcctgaagggaatagggagcagctctataaaacgggcatgaaggtggcgcataaaagctttggtcagggtataataatagacgtcagggatgacggcaggaatgtaattttgaaaatagtctttccgggcaaggggattaaggagctttcagcgaagcatgctcccctgaccatactataa

SEQ ID NO: 2009 - DNA, 1998 bp, unclassified Clostridiales
atggaaaaattatttcattgcgtctcatattatcctgagctttggcctgaacaggaaattgaaagggatatcgcttatatgaaggaatgcggcataaatttggtcagaatgggtgaatttgcttggcactttatggagcccaggccggacgaaatagacgtatccttttttgttaagacagccaacaggctctatcaggaaggaatatatactattatgtgcactcctacgcccacgccgcccatatggctcactcataatcatccggagcgtttggcaactgacatatacggaaataaatacattcacggcgcacggcagcatgtctgtaccaacaatccctatttgcgggagcgcggactgaaaattacagaagctatggcaaaggcgttcagcggcagcccggccgttatagcctggcagctggataacgagcttaaagcgctggtaggggaatgcgtatgcagtgagtgccgcaagcgctggcacaaatggctcaaagataaatacggcgctattgaaaatttaaaccaggcctggggcactgaaatctggagcgaatactataacagctttgaggaagtagtccagcccctgaaccctcccgtaattcacaattcctccctaatgacgaattacaggcagttttcgcgggaaactgtaaacgaatttgcccatgaacaggctgccatgataagaaaatacagcaatgcgcctattactcacgacgtacatactaatttcgcgctggatacccatgctctgtttgaaggattggatttcacctcaatgaacggctatacgcaggatgacggctataatatatggctgtttgattatgacctttaccgcgccatgaaacaggacggccaattttttgtcagcgagaccagtcccagctacgccggaaacttattgatgaccacaaggccgcacagggaaggttttcttgagattgaggcgctgggcgcatacgccagcggcgccttcggcttttcctattggctcttccggcagcagcgctctggaatggaacaaacccacggcagccttatttcctcctggggtgagcctgagcttggttttgagcaggtaaaaagagtagaaaaaatgcggcaaaccatccagccctattttctgcgcacccggcacaaacatccccaggcggccatgacgtattctgaacaggcgcgcttattctttttcaccgagccccttttggagggtgaaggatattttgaaatgatgctcaagctgcacggcagcctggaatgcatgggcctgcacagggaccttataggggaaaacgcttccctggaaggctataagcttttaatcagcccgttcctgccctatgtttcagacgaatatatctgcaaagcaagcgaatttgtgcagaacggaggcatttggattatcggtccaatgacaggttaccgtactaaagagcatacagttcatacggaccgctgcctttcctctcttgaggagcttgcaggggtaagggtaaaatatttttatcccatgagcaatacaggcgcaatgggctgctttaaagggatgtccgctcccctggttctgcacggctgcattcttgagcctgttgaggctgaaagcgtgggcagcataaaaggcggcctgactcctgattattcctttattaccgaaaaaaagctcggcaaggggaaaatagtactgctgggggctatgcccaatatcaatttaaaggaaggccaagcgctttggcgcggaataatagagcattacgcagatgaagcaggcatagacgaccgctttaaggctaaagagggcacaacagttattttcagaacgggcgaatatgaaatagttaccgccattaacggaaacggggaagggggagaatattatctgccccaggacggctatgaaattttctccgcctcccaggtcagcgccggcagccgaatgctccctccgttcggctatgaaacggtaattttggggcataagaagtga

SEQ ID NO: 2010 - DNA, 1155 bp, unclassified Clostridiales
atgtgcaaaagattatatatcataattgttttaactctccttcttgtcgcagctatttgcccttccctgggagcgcaagccgaagacattattgaggacagtataaacggcctggatttaagcgaatgggagcagtttcttaattccttaagtgaggacgagcgtgccctgctgcccggcgacagcgcaacaagccttattgaggacattgtccaggggaaattggatttaagctatgacaatgtgctggaggggctgctttctctgcttctgcaccagttttacaagctgctgccgtttatgctggagataaccgttctggcaatattggcctcggttattactaatatgcagaatagcggtcagggagtaaacgaaataatacgctttgtgctctatgcccttatcgcacttatattatgtcaaagcctgttttccctggtgagttatgcaaaaaacgcagtagaaaaaataggttctctcattcagctggctacacccatattgctggccctgcttatatccataggagcttcttcctcagccggtgttcttcagcccgattcagccatacttgtttcgggcgtaggcggaatcctgaccacctttgtcatacccataattcttataatgaccgttttagtgtttttatccaacctctctccgcgcattaagctgggcggcgtcgcttctcttatgcgcagcgtcgccagctggaccatgggtatagtctttacgatattcgccggggtaatctccattcagggacttgcagccgcctcctatgacggcgtatccctgcgggcagtaaaatacgcaatcaataccgggattcccattattgggggcatggtaggcgaaagcatgaacatggtgctctcctgcactctgctgattaaaaacgccgtgggaatagtttctctgctctgcatggcaggaataatgcttgcgccctgcataaatataatagcgtatatctttatgcttaagtttggcgcggctgtgctctctcccatttcggaaggcaatatatccaattttttcaaccagcttgccgattcgcttaagctgctgcttacggctgtctgcggcatgagcattatatccctaattctagtaggaataattattggagccggcaacgcggcagtatag

SEQ ID NO: 2011 - DNA, 2259 bp, unclassified Clostridiales
atgtacgcaaagattattaccgatatagcgcatcaggatgtggacaggatatatacctacggcgtacctaaagagcttgaagctgctattgcgccgggtatgcgcgttatcgttcccttcggcggacgcaaagaggtggaaggctatgtgctttatttagccgagacttccagcgtaccgcctgaaaaacttaaatatattataagcgcgtgcgacgagttccccgcgcttaatcccgaccagcttgagcttgcaaaatggatggcgcaggaatatcactgcatgcgcgccagcattctgcggctctttttgcctgccgaaatgcggggcggccgggtcaataaaaaatataaaacaactgcccggctttcaggggatgaagaggctctgcaaaaagtgctttccaacggccgcacgggggaaaagcagcgcagggtaataagcatgcttatgcgccacgggcggctggactgcgcggatatagagaaagagctcggcggcgcgggcacgacccttaagacgctggaaaagcatggggtaataatattgcagaaagaggaaatcaggagaaatccttacgattccctggccccggcgcccggccaatggcacgaattaagacccatgcaggagaacgccctgaggcatatcataaacaacatgggccagggaagggacgtgcttttgcacggcataacgggcagcggcaagactgaagtatatatgcgggcgattaagcacgttttggagcagggggggagcgccataatgcttatccctgaaatctcccttaccccccaaacggtagagcgtttcagacagcggtttggagagagcgtggccgtgctgcacagcgcgctgagcgccggggagcgctatgacgaatggaggcggatacgcctttcggaggccagggtggtggtaggcgcccgctcggcagtgtttgcgccctgcgaaaatttgaagcttataataattgacgaagcgcacgagagctcttataatgccgaagggcaccccgcttaccggggcatagaagtggcgaaaaaacggatgaggctgtgcggcggagcgcttgttctgggcagcgctactcccacggttgagcagtactacgaggccaaaaacggcgcatatgatattatagaattaaccgagcgcataaacgggcggccgcttccccaaattgaagtagcggatatggccgctgagctggccgcagggaacaaatctattttttcccgtcagctttttgaggcgcttaaggagactatagaccagggcaatcaggctatactgtttttgaaccggcgggggcactctacaatagtcaactgccggagctgcggcaagaccgtgcagtgcgtcaactgcgaggtatccatgacctatcatctcagcgcggtaaattcgcggacgggaaagaatagattgcggtgccattactgcggatacgagatgccctatcctgaggtatgtccctattgcgggagcaaatttataaagcatatgggcgccggaacggaaaaggtggaggagcagtttaaaaaactgttcccaggcgtggctacgctgcgcatggataacgataccacgcgcacgcgcaacgctcatcttgagatactttccgcctttgcccgcagggaagcgcaggtgcttataggcactcagatgatagcaaaaggtttagatttcccggctgtggcgctggtgggcatagtttcggctgataccatgctgcagcttcccgattaccggagcagggagaaaaccttttcccttataacgcaggtggccggccgtgcgggccgggccgaagcggcgggacgggtcatacttcaaacctataccccccgccattatgctatagtcaacgctgtaaattatgattacgagaatttttacaatactgagataatgcagagaaagcaggggctttaccctccctttgcccgattgatccgtctgctttttgtgtccgaggattatgacgctgctaaaagggcgtgcatgttttcctatcaggaattaacaaaaagtttaaaggaggcagatttatggaggaacgtagtatttcttaccatgatgagcgctcctatcggaagaataaagggccaatacaggcagcaggtattaataaagctgcgcagcggccctgactgcgataaagccgagcaatacatatttgagcattatgataaaatagaaacagataatttttataaggacatagaggttaatccgtccaatttattttaa

SEQ ID NO: 2012 - DNA, 2712 bp, unclassified Clostridiales
acgggcaatgaagcacagagctacatgacggctgataacccgtttatgataataggctctcttctcatatgcctgctgtttatatatctggtatatgttgccttttccataagaaacggccgcataaaggaatttgagcctatagccgcgggcgtgggggatgaaaccttccgccccataacgctgagggacgagagcctgaaaaatgaactctttgagaaagagctgattttacatgcaactggatccaacgcggccggcgaggaggacgcggttatggatgaaagcgctttggctgatgcagttcaaaatcaaaaaagtttaataggtccgtcctgcggcgaagaagaaatggagaataagcagggccaaagctcccaggagatgagcgggccggagaatgctgaagaagcggccggcgatgcagccaatacggcggaaaaaaacagtcttgaaggcacagaagggacgttggctatggacggcatggaaaacgcgcagaatattggggaggataccttaaagggtaacggcggcattcatcccggcgcggaggaatcggccttatctgagatccaggaaggtgtatctgaaacagatgcggctgcccaggcggagccgggcactgttcaggctgatgaacaaacggcgcaagctgataatggcgggaaagaaagcggggaacaggagaaaagcacctcggatgcgcctgctgcgcctgacggcactcctcttgtgcgtacggcggaaaatctctctgaattaaaggttatatgcacgctggaatcaaagcgcaggcatgattttaataaaatgcataagaagcggctgctggatttaaaggatatcctgataatggcggttgtaaccataatttattcagtggtagcttttattaatctgggttcaaccgagtataccccctcctcctattgggaaacccagacgccaaacgaggaggctgtaatagattttggcggggtatatgatatggagaggatatatttgaacctcaatgtgcaggaggtcgccacagattacagcatgcggctctattattcagaggacgggaccaactggcagacattagataccctgaccttcaacagctttaagctgttcgtatggaaccagacgggcgagctgaacggcgataagacggtaaatgtgcgcgcacgttatttcaggatagtttcagacagcctgaataaaggcatgcgggtaaatgaaatagtgttctatcaggatgcgcaggaggatattctcgtacccattcagagcgtggacggagcttcaggagagcatggagccgcctgcttaacggacgaacaggataccgccgccgtgcgcacctatatgtcctgcatgtattttgatgaaatataccatgcgcgcacagcctacgaaaatataaacagctggaacgtatacgaatggacgcacccgccgctgggcaaggttataatgtccttgggtatacgggcctttggcatgaatcccttcggctggcgtttctgcggtactgttgctggtattctgatgctgcccgcgatgtatattttcggcaagctgctctttaagaagcgggtctgggcttcggctttaatgctgcttatgaccctggacggcatgcattacgttcagaccaggatagccacgatagattcctattcggtgctgtttattatcctgatgttcctatgcatgtataaatattatacaatgagcttctatgaggacaagctttggaagacctttattccgctgggcctttcgggcatattcttcgggttgggggccgctacaaaatggatatgcctttatgccggcgtcgggcttgcggttatcttctttataagcctgggccgccggattatggaatatatgcgagcgctggacgcggttaagcaccctgaaaaatacagtcaggctgaacttaaatatttaaggcatataagcgacagctgtctgcgcaacgtaatactgacgctgctgttctgcgtgctgttctttgtaataataccggggataatatactgcctgagctatatcccgtatttcgatacgccagaaaacctgggtaaaaagtggtacgatataatctggcagaatcaagaggccatgtttaattatcattcggggctgtcggacagccatagcttccgctcgccctggtatgaatggccggttatggcgcggcccatgtggttctatgacggagtggatactgctccggcgggcatgatggaatgcatatcctgctgcggcaatccgctgatatggtgggcgggcctggtatgcacggtgataagcattgcaatactcgttaaaaaggcgctgaggcggtataaggtgacttcgccccagatgcttttaaggcggaacagggaagtgcagatgctgctgtttattactctgggccttgcggccaattatctggcctgggtatttgtgccccgctctacctttatatatcattattttgcttctctgccctttataatgatgtttacggtatatgtctttaaaaagctctatgagagcgcttcaggcaggcataaaaagcaggtggctgccggcataatagctttcttcgcctttgcgctggtgctgttcgccatgttctatcccatttataccggcactatggtatcccgctggtatgtggataatttcctggtatggctgccctcctggactttccacggctga

SEQ ID NO: 2013 - DNA, 1734 bp, unclassified Clostridiales
atgatttgtaaaaactgtggacaggaaatccccaacgattctgttttctgcactcattgcggaactgcatgcgaacagaaaccagcagaagccgcaaatgaacaaaatgaacagcagactgtatccgatcaaacatatgttcagcagccggcggaggccgttcctccaaaaaagaagggcaaaggacctaaaattaaactgattgccattcttgccgctataataatagttgtagcaggggtgggcacactggcttataattcacagcctgttctatcccgcctgtttaacggcgaaaaagagcatttaaccatgctggtggaccggctggaggaaaaatatactcaaaatgaaaatgctcctgtaaacaacgttaaagctaaaataaattataatttcagctatgacttaaagcagctggaggaagccggcctgccgctggacggcatagaaaataccgaaatttttctgagccaaacaatgcgcatagattcggataaagctttataccgcattgaccaggaagggtctttgctgggcgctgaactgcccgaaatatcggttgttcgcaattcctccgaggatatgggtatttatattgagtcccttactaaggattatatagattatagttctttcctaaccctgctcaatgaatacggcgtacttactcaggcagagctgtctgcaaatcaacctgtgacaaccaatctctctgcagagcagctggaagagctgctacctttgctggaaaaatataaagatgctatcattgatactgccctggattccggagaagtagtctatgaatccaataacgacgacctcggatttaatgcttactactacgaaattactttaacccctgaaagcatatacgatattatgcaggcaatcatggaaactctaaatactgacgatcagctcaagcttgagctttgcgagctcatcagccccgataacccacaagaaatgcttgaggaattgaatacttctatttcggagctgttagacggaatggcacaagaccgcgactcttttatccaagaaatggaaacagaactggatgaaataaaaatagaactttggtttgacggccgaaataacccccttggcacagctttagctattaatgcttcagaggacagcacgaaccaggatattgaaattactctgcttgactacaagcacggccgggatacgcttactttaattggccttgacatagacggagagaccatgtttgaattgagcaatgaagcggaggtaagcggctccaggaaacagggttcgttggatttggaaattaaccagattaagctgttgaagggagaatatgacctcaccggctatgaagtgcagggaatacagctttatgaaggcaccgccgactttacattgacagtagaaacagattcctccatgaccgcagactttagtctggaatgcactatggaccggatgaacaatggaatgcgtatggacatcgagccgactgtgtatatatcaggctataacatggcaaccaccatggactttggagctatttcttcagaaataaccgttgaaccgctggatgaagaaattgaagaagtaaatgttgttgaagttactgttgaaaactatgctgacgttcttacgcctgatgaatttttagccaaagtggaagagttcgcttcaacccttgaaaatctgggaaacacccttccttcaaccgattcgccgttatattaa

SEQ ID NO: 2014 - DNA, 2991 bp, unclassified Clostridiales
atggataagcttatcagggaatttaaaaatcccccggcggcataccggggcaagcccttctggtgctggaacggaaagctggaggggcaagaactggagcgtcagctggaggtctttgagaaaatgggcatgggcggcgcattttgccacagccgcaccggcctgaggacagaatacctttcagatgaatggttcgagcttataaaccgctgcgcggctaagggcaaaaaggacggcatggagatatggctctatgacgaggaccgttatcccagcggtacagcgggcggcatggtaactgaaaaccgcgaattgggcattcattatctccgcctcaataaggcccagggagattttaaatggcaggagggcgtaatctgcgcgtttatcctggaatttaaagaggataaaattgtacgcaaggagcgtatatataaggatgcggctgttcctgaaaactgtgaaatatggtattttacttcggaaataatgaattccggctccttttataacggcaatccctatgcggataacgccaatcctgagacggttgagcgttttatcgagctgacccataagcggtatgtggaaaaatgcggggagtacataaaggacggtaccataaaaggcatatttacagacgagccccatcacggcggcgttatgaacggcttcgccatttccaatcccgacggcgcgcaccttattcctcatcctaagaacctgtttaagcattttgaaaatgaatacggctataaattggaggattatctgcccgaaatatacgcttttgacgcttcgggacgggcggagcaggtaaaatggcattacatgctgcttttgcagaagctgttcctggagaattttatgggcaagataagggattactgccatgaaaacggcctgctgtttacaggacatgtgctgcacgaggactgccttacggctcaggcggttatgcagggttcggtaatgcgctgctatgaatatatggactgcccaggcgtggacgtgctttgggaggagaaccgggattatcagatagtcaagcagctttcttcagcagcgcgccagctggaaaagccctggctgctcagcgagctttacggctgcaccggctggcagaccaattttgcctcctataaggcgatgggggactggcaggcgcttctgggcataaatatgcgctgtcagcatctgagcttttacaccatgcagggcgaatccaagcgtgattacccggccagcatattttatcagagcgcgtggtgggatcagtttggcgcggtggaggattatttctcccgcataaatgttttaagcatgggcaaagctctttgccgcacgctggtagtcaatccggtggagagcgtttatacccgcatacatccgggctgggccttcttcctcaatgccgtggacgaaaaagtgtgcaagctggagggagaatacaaagcgcttttctatatgcttattgaaaataagattgattttgattacggcgacgaggagatgatgtccaggctggcgagtgtgaaagatggcgttctcagcgtgggcgcagggaaatatgatacggttatagtgcctccctgcctgaccctgcgctcttccacctttgagcttctggaaaaattctccgctcagggaggcaagcttatactcatgggggatatgcccggcctggaaaacgcgcttaagagcgacaggatggagaagcttcagggcgagcgcataccctttgatgaaaaggagcttatgtccagactgcccgtgcccccggcgactgttaaaaaagagggcgaaaatgtcaaagcaattctctcccgcgtaaccttgataggggacagattatttgtatatcttatcaataacgaccgggtaaatccggtggggcctgttgatattgaaattgagggagagggcgtccttgagcgctgggacgcgcgtacgggcgaaataacccggctgcccggcgggatgaagctggagaaaacctttgcgccgggagaagaaataattctctgccgctgcgcttccagccaggctgctctgcctgaaaattattccttgggcgaagaaagaactatttcagaatttgcctataagctggaggaaccgaacgtatgcgtgcttgaccaggtgagcataaaagtggatgacgaggaatttatgcctgtgcaggagatacttaaggcggatatttatttaagggaccgctttaagatagaacggcgttcgggcgagatgcttcagccgtggtataaagagtcccgcaatattaaggaggaaaacgtctgccgccttaccatgcgctttgaatttgaatgcgaatacgtcacggatatgaagcttgcgcttgagacccccgaattatttgaggtgaaaatcaacggccatgaagtgcatgccggcggcgattggtttattgacccctgcatcaaaacagcggacattcctgccggcgtaataaagcctggaataaaccaagtggttctgaccaccaattttaacggaggagttaatcttgaggcgctgtatattctcggacagttcggcgtccgcattgacggactgcgccggattatagaacagctgcccaaaactcttgcggccggggatatctgctctcagggtctgcccttctacggcggcgtgatagaatatatcatgcctgaagcaataaagggcaggacgagagtcagcgcgctctttgacggcgcatgccttcaggcgaacagcggcgaaaacaattcccttatagcctttgcgccctattatacggatatagacgctcagggaccgctttctctgcgcctttaccttacccgcagaaacaccttcggccccctgcatatgaagccggctacagccttttcttacggcccggaaaatttcgtgacccagggcgagaactttgactataccggctacatgctcctgcccgcaggacttagggagcctgttaagctgacggcgcttaaaaaataa

SEQ ID NO: 2015 - DNA, 2211 bp, unclassified Clostridiales
atggagttttattcagttaagggcaagcggcccgtaaggctaaaggagagcacccgcgctttggctgcgcgcgccctttcgggggaatttgggcaggaggccttccatactccatttgttgaaataacaaatccggaatatgaaaatatgtcctcggaagaacagtatatctgcatgctgaataccatagtaaccaaagctcccttgcgtattgttccgggcgaaccttttgttggttctgcaacattgggagacgcaatttttgcacaggtccctgcgcgttataatggccaaaacgtattctgcgggataaatcatataaccgtgggctttgataatgtgctgtatattggccttaacggccttcgtgcccagatcaggggcagaagccaatgccagaaggatgaaaagaagcaaaattattatggctgccttgaaaaatgcatagacgcaatagaactttggcataagcgttatctggacgaattattgagcttaatagcgcagcatccgggcgagggttatgaagaagtttatgaaaatcttaaggacgtgcctcttaatcctccgaaaaatttcaggcaggcactgcagtccctgtggttcctctttgcttttacccggcttataggcatatggtcgggcattggccggatagataaaatgctgggcggatttttggaggacgaccttgcaaagggcgccataagcatagaagaagcgcgcgaattgacggcccatttctggataaaaggctgtgaatggtgcaagggggatttagtaaagggcagcggagacgcccagcattatcagaatatcctgctgggcggccgggatatcacgggcaaagatataaccaatactctttcctatctggtattggatgtagtggaggaactggggataagcgattttcccatagccatacgcgctcataaggatatgcctgagagctttctcaggcgggcggcggaggtagtgcagtacggcgcgggcattatagctttttatgacgaacagagcgttatagagacattgatgaattacggctatccttacagcgacgcggtaaattttacaaacgacggctgctgggaggttcttattcccggcaagacacgcttcagctattgcccgatggatatgcttcattatttgcagacagacgtgctgggagtaaataaagctatagaacatgacggcagttttgtgggcatgtatatgtctcttcaaacagcttcccctgctgaaagcgacgcacccatacctgaatatgcagattttgacgaattgtatgaggctctgttaaagggaatagaaaaagcggtagcctgggtgcattcggatttggacagcagagcgtattaccgaacggaggaagctcctgctacggcccttgttatgtcgctgtttgtagaaggctgcattgaacggggcgtggatttttccaagggcggttcttattacgatgtccaggccatacatatgggcggggttcaagactgcgccaacagcctgctggctattaaaaagatggtctatgaggaaaaattactgactctttcggagcttataacccttctgcggaatgattgggagggcagagaggatttaagactgtatgcgctgaacaaactgcctcattttggaaatgacaatgcccaaagcaatgaaatgacagtgcgccttttaaatgactatataaacattgtgcgcgcttatgaccatagggcggacggcattaaatgcccgccgggagtttccactttcggccgggagggtgaatggaggtacgccaggggcgctacggcggacggccataagcgaggggatatactttcgcccaatctcagccctgcgccgggagcagataagcatggggctacggcggctatacaggcgtattgctctcttcccttaaaacagctgccgggctcatgtgcgctggatatcaaactggggccgttcatggcccgcggggaagagaatgtagacgctgtcatggggcttataaagggcttttgtaccctgggcggctattttatgcagatggatatagtggatgatgcgattttgaaggatgcgcagctgcatcccgaaaagcatcccgaattggctgttcgtgtatcgggctggtcggctcgttttgttaccttggacgcacagtggcaggagatggttataaaacgggcgtcagccggcgggatttga

SEQ ID NO: 2016 - DNA, 3723 bp, unclassified Clostridiales
atggacaaccgggtaaaacgcatttttgtagaaaagaagccgggcttcgatatagaagctcaagccctggcctccgatttgagagataatctgggaatcacaagcatcacaggcgtgcgcctgataaaccgttacgatattgaaggactggacgatggccagctggacctggccgtgcccaccatcttcagcgagcccaacgtagacaaagtttcctttgaaaccatgcctgtttcaggacagattttaataagcgaatacctgcccggccaatacgaccagcgggcagattcggccgcccagtgctgccagctgctgaccggccaggaggcgcccctggtgcgctgcgcccgcgtttacgcttttgagggcctgctctctcccgaagaaatggagcgcatagaaaaatatataatcaacccagtagaatcgcgcaaagcttctccccaaaaaccagacacccttaaaatgacccttgagcagccgggcgccgtagaaatcctgactgattttataaactataccgatgaacagataaaagaataccataagcagatgggctttgccatgtctcatgaggatttagcatttgtccgggactttttccgtcaggaagggcgggcgcccagccaaaccgaattaaaggtaatagatacatattggtctgaccactgccggcacaccacctttttgacccgcctggattcagttgaaattgaagaaggcagctttaccgcccccataaaggacgcgctggccctctatatggatatacggaaagaccttaaaaaggaggataggcccgttacccttatggacatggctacccttgccgctaaggagctgcgcaagcagggctttttaaatgatttagacgtttcagacgaaaacaacgcctgctctatagtggtaaacgccgtcattgacggcagggaagaaaaatggctgataatgttcaagaacgagacgcacaaccaccccaccgagatagagcctttcggcggcgcggccacctgtctgggcggggcaatacgcgatcccctttcggggcgcagctacgtttaccaggctatgcgcataacgggcgcggccgacccccgcgtacctgtcaaggacactatgcccaacaaactgccccagcgcaagataaccacgggcgccgcggcgggctattcctcctacggcaaccagattgggctggccacggggctggtgcatgaaatataccatccgggctatgccgcaaagcgcctggaaataggcgcggtggtaggtgcggctccctttgaaaacgtccggcgcgcccagcctgagccgggagacgtcatcctgcttttaggaggcgcgacaggccgggacggctgcgggggcgcgacaggctcctctaaagcgcatactcttgaatccctctccacctgcggcgcggaggtgcaaaagggcaatcctcccactgaacgcaagcttcagcgccttttccgcaacacggaatgcgcgcgcctgattaaaaaatgcaacgatttcggcgcgggcggcgtatgcgttgccattggagagctggctgacggcctggacatcaatttagacgccgtacccaagaaatacgaaggcttaagcggcactgagctggctataagcgaatctcaggagcgcatggcggtagtgctggataaagccgactgcgcgcgctttattgagctggccgcggctgaaaacctggacgccgtacccgtagccgcggtaacggatacgggcaggatgcgcatgttctggcggggggatacaatagtagatatcccgcgcgcctttttagacaccaacggcgtaacccagcacgcggacgcccttataaaggcgcccaagggccttaaagaatactttgagcctgaaaagccctgcttcggcggactgcttgagagcataaccgacctcaattcctttatacagaagggactgtccgagcgctttgattccaccataggcgcaggcagcgtattaatgcccttcggcggcaaataccagctcacccccgtgccctatatggcggccaagctgccagtaatgggggaaaccgacctttgcacagttatgtcctggggctttgaccccattctttccagcctctcgcccttccacggcgcgtattacgcggttgtggaatccctcgcgcggctggcctgctcaggcgcggatatttcgggcgcgcgcctgacccagcaggaatattttgaacgcctgcgctctgagcctgaacgctggggcaagcccgcggcggctctgctgggctccataaaagcgcagatggactttaaagcgccctctatagggggcaaggattccatgtccggttcctttatggatttggacgtgccctccacccttgtcaatttcgccatagtcacagccggcgcttcggatataatttcccccgaatttaaggaggagggcagctatatatgccttatgcgccccgacagggatgaaaactgcatgcctgacgcgcaggagcttaaagcgcgctatatagccctggctgctttaatccgctcaaaggaaatttccgcggctatgccggtttcccgcggcggcgcggcggcggcggttataaagatgtgcctgggcaacggcataggagcggaccttttaaatctctccccccaggaattttttgctgacaatccgggctccgtggtatttgaggcgcgctcggccgaaactgctcaaaaactggacggagtgataataggccggacgggcggcggcgccataagcctgaacggagaacagataaccctcagcgaggcggctcaggccggactgtcagtgctggagaatattttccctgtatacgcctccggcaccgaggccagcgcggtttcccaacccaaacgggaatatcccgcctgcgcgccggggcacaaaaccgcgcggcccagggtagtcatcccggttttccccggcaccaactgcgaatatgacagcgcgcgcgccttttcccaggcgggcggcctgcctgaaatcctggttatacgcaaccgcactcccgaggatatagcccaatctatagcccagcttaaaaagctcattgattcggccaacatactcttcctgcccggcggattttcgggcggggacgagcccgacggctcgggcaaattcatagccaccgtactgcgcaaccagaaaatcatggacgccgtgcatgagctgctctataaccgggacgggctgtgcctgggcatatgcaacggcttccaggcgctgataaaaaccggcctgcttcccaatggaaaaatcgcccccttagaagaaaattcccccaccctgacctttaacactctgggcaggcatatttccactgtcgcgcatataagggtagcgggcaataattccccctggctgtctctctgccgtccgggcgaaatatacgccgtgcccgtttcacacggcgagggacgcttctgggcggaccaaagccagcttaaggcccttattgacaacggccagatagccacccagtactgctcccccgacggaattgtttcgggttcgggagaaagcaaccttaacggttcggtcatggccatagagggcataatttcacctgacggccgggttatgggcaaaatggggcatactgagcgggcagggcgcaatataatgaagaatgtacccggctgctacgatatgaagctgtttgaagcgggctgcaattattttaagtag

SEQ ID NO: 2017 - DNA, 1161 bp, unclassified Clostridiales
atgtcctttataaataaaaagaggcttaaaaatatagaatatatcctgcccgttatagtgctggtaatatccctgtttggagtattctgcatacttatggccacggccagcccttttacgggcgaagagcttacctttgacgaaatattggctaatctgaacctttccaaagttaaaatgcagttaatttggctggctataggttttgtctgcatgatagtggttatgctggtaagctacaggctttacgcgaaaatctggtatgcggtgctgggcgtttctttagctctgctggctttggtaatagtattcggctcggtgcgcggcggcactaagggctggcttgtgatatccgaatctcaaaacattacctttcagccttcggaaatagttaagctggcggttgtgatattgtcagcgcattttttgagcaggcggcccttaaaaacctttgtggatttgctgccggctattggggttttctgcgttatagtcgcggtactgctctatcagatggatataggcacaacccttgtttacgttgtgatatttgcgggcatgctctttgtttcgggagcgaagctgcggcatatcgggatattggcattggcggccgcagttgcttttctgctcctttggttttttgccatgggcgaccagcagaagagccgtatattaaatttcggcaatactgaggatgtggatcagctaagatattctaagatagcaataggttcaggcggcgtttttggaaaagggcttttcagcgtgggcaatatgagccagttaagctatattccggcgatagagactgattttatttttgcggtaataggcgagtccctgggctttttggggtgcctggtcgtaattttgctttatatggctctgatattccgcctctggcagcttatgcgcggctgcaaggataaatacggcaaattaataatagccggcataatgttcatgtatatgttccacatttttgagaatataggcatgactataggcgtaatgcctataacgggcatacctttgccctttataagctacggcggcactaattttgttaccaatatgataggtatcggtcttgttatgagcgtttgcttttaccgtcctgaaagcgttgttaataatcctgaggagctggaaatataa

SEQ ID NO: 2018 - DNA, 1065 bp, unclassified Clostridiales
agaaactttcgtaattatgaatatctggagctgccccttgaaaataatatatatattttcacaggggaaaacgcgcagggaaaaaccaacctgcttgaagctgccgcgctgttaagcacgggaaaaagccaccgcacagcgcgggacagggatatgatacgcataaacgagccttttgcgcgggtaaaggctgtaagcatgcaggcggacggagaacatactgtggacgtagtgctttcccggagtgaaaaaaagcgggtgctgcttaacggcttgcctataagccgcataggagatatgataggccagattaaaagcgtgatgttttcgcctgaagatttggatataatcaaatcagggccctcacagcgccgccggttcatggatttagacaggtgccagatgaaaaaaagctatttttacgcattgaacacctataatcatgttcttgagcagcgcaaccacctgttaaagctgacggcggctaaggaagtggaggacactttatttatatgggatgaaaagcttgcagaggcagctcagcccattatggccgagcgcaagagatttatagaaaaattaagccccctttgcgaaagctttcattcagaattgagcggcggcaaagagactcttaaagcgatatatgaaccttcagtagaaggggaagaaggagagcttaaggaaaagctgcttaatactctcagagttagttgggacagggacataaaaaataaagtaactggaaacgggccgcataaggatgatatagcgtttaagctgggggataaggatttacggtggttcggttcgcaggggcagcagcgcactgcggctctggctcttaaattggcgcagcttgaattgataaaagaagaattgggagaatatcctgtattgcttctggacgacgtgctgagcgaattggatgtatccaggcaggaacggctgttaggcaggcttaaaggcattcaggcgcttattacggcggctgaattgtctgaaagcttgaaaaagctcccagccaggattataaaagtaaaggaaggaaagctgtatctttaa

SEQ ID NO: 2019 - DNA, 1395 bp, unclassified Clostridiales
atgcgagaaacagaccgaataatagataattatgcggaggaaatggcgcagcgcctgcgcgagcttatacgcatcccttcagtcaaggataatcccctgccgggcgcgccttttggcgagaatataaaaaaggctctggattacaccctctctctttgtaatgagctgggcctggaaactcaaaatgttgacggatacgccggttatgctcagatatcaggcgaaaaaaaggaacaattaggcgtgctttgccatttggatgtggtcccggcgggagacggatggattcatccgccctatgaaggagggatggaaaacggcgtcatatacggcagaggcacggtagatgacaaaggtcctgccatttccgcaatttttgcccttaaggcccttaaagccgcgggagtaaagtttaaaagaaccccccggcttatctttggctgcgacgaggaaagcggctgggagtgcatggactattatgcggataagataggaatgcccgaaatgggcttttcgcccgacgcagattatcccataattaatactgaaaagggcatttatcacgctcagcttaaaaagaaactgccagggaacggaaaatacaggctttccatacacggaggcaccagggcaaatgtcgtgcccgatttggctcaggcgcacattgaaggaaatatagataaattagccgagacactgctggattataactgctctgaaaacggcctgagctttactgctgaaaaaaacacattggatattactgccaagggagtaagcgcgcacgccagccagcccgaaatgggacagaacgcattctttgcgcttttaactcttttagataagctttccctggggggcgaagaagggcatattattcaaatgcttaattgcgcatttattaataagactgatggcagcggcattcccggcttgaaaattcaggatgaatttggaccgctgactatcaatctgggattattggatgccggaagcttttacggcggggagaaggatgaaataagcctgacattggacatacgcttccccgtaacctacaattaccaatatatagaggataaattagcggcattttttgacggctggacacttatacgcggacatgtacaggctccacaccatactcctgaagagcacgaattggtccaagctctcaagagagtttataaagaatattttaatcgggaaggcagatgtctggccataggcggaggcacttatgcccgtgcgctgaaaacaggcgtagctttcggcataaccccggagggcggtatttcacaggctcataacaaggaagagaacatatccatcaagcagcttgtgctcaatgcaaaggtatttgcggcggctattgaggagctggcctgcaaataa

SEQ ID NO: 2020 - DNA, 1524 bp, unclassified Clostridiales
atggctgtcagaaaaatgcaaaaaataaatatgcgctgggtatcaatcggcataaccgtaatactgtgccttgcggccgtaattataaccctggtgctcgtcaaatcctaccaggatgaatccgatgcgtatatcaacagcataaagcaggccctgcaaaacggttcggaggaatttgaaatccttaattcgtccgtgatttacgacggcgtatatatagagaacgtaccggtaggcggccttaccttagacgaggcaagggaaaaagtagaagaaaatataagctcaggaacaggcgagccttatatcaatatgacttacggcggcaaaacctggacgttaagcggagcagacctgggagcgcaaagctctcttgaaacggccttggaacaggcctggaacgcagggcgcaccggctcctcctcagaaaggctggctcagatagagcaaatagcgcaggagggctatcatatcagcattaccgtgctggccgacacctcccttattacgcagacccttaaccagataaaatccgagatagaccaggaggctgtaagcgctacggtatccttcaactacaacacacagaccaatcaggctgaatttacctatacagaagaatctgccggccgtgagctgaatgttgaaaccgcggccaatgaaatactggttgcatttcaccagtcttcccaggtcaattacgagcttaagcctgaaaccatagagcccgaagtaaaactggcggacatacagcacgattatgtcaagctcagcgaattttccaccaggaccagcagaagcaacagctcgaccgaatcgggcaagcgcaccaatatccgcatttcctccgctgcctttaataattatgtctggatgccgggcgatatactctcctttaaccagactaccggtaagcgtaccaaagaaaagggctatgaaaccggactgttcataacttccgaccgtatatatgacgaaataacgggcggcggcgtgtgccagacttccaccaccctctttaacgcctgcatagaagccggcgctaccgagatcggcaaaggaggcattatagagattaccaggcgctatccccactcctggccgtcaacttatgtcgcaccgggtcgggacgcttcggtaaactggcccagcgccgatctggtcatgcgcaacaaccgcgacacccccctgtttatccgcgcttattttgaaaattataccgttacctttgaaatctggggagtggcctttgaagataacgccgactatgaaatagaggtagtgctcatagaggagacgccggctcctgagcaggaatatattattgatacctcacacaaatatgtggaccagcccggcgaatatgaagtagtttcagaatcccgcaaaggctatgtttatgaaacctatcagatcaaaaaggtgcccggccaggaaccggtaagaacacttatatatacttcaacatataacccgataccaggcaaaacctactatctgcccgcagaaggcaccagcgaataa

SEQ ID NO: 2021 - DNA, 1920 bp, unclassified Clostridiales
atgaaatacagcagtttttccagaaaaaataaaaaaggcagtaaaaatacgggcagatatccgcatacccaagcagaaacgcaaaaagagaatcctgaaaataaaagcgggcttgagcggacggatgataatgcggtcatggatgatagcggacagaataccgatacagcagaaaatccgtctgcatcattaaacccatttgtgcctgacagcccgcccaggccagcggatgcggctccgcctaaaaaaaccgatttatccgcggacacggctaaggataggagcagtaacctgccctcgcaggtgcctcagtccagcgcgccctcccagcagacggacagagttcagcctgcggaccggggaattgctgaaaatgccgctgagctggacggttcagccgataacagcaccgcggcccaaaccaagctgtccaacgcttccggtctcccccggcaggacgaggccgagagtgagcagagcgacgaatcagatatggtggacatggctccaggcagatcggaacgtcccaaaaggaaaaaatccaaagccatatccgctaaagagaatttaattttccttacagcctgcatagcagttattgtggctattcttgtagtatccataaaggattccagcaataccgcagatgtaagtcctgaaatcaccccgcctgcagggcagtctactctgactccgcccggcgcctgggccaatcctacccctaccgggcctccccttatttccgagccttcgggcatgataataatggataacagcgtgaacgcaaagcagattttagttgaagaaaagcgcatcaaccgcccggccgtttacggcagcgagctgcttttttcggcgggcaacggctccattgaaaagcctgtgctgaccactctgtatctctttgacgttaccacccagaaatacacaaaaatcgccaccacccagattgaggacggggaaatttttgagtattttctaagtgataaatggattatctggctggataccgaccataagggcaccaacattatatataaaatgaacaggcagacaaacgagataagcaaggtacgcgaagtaggcaatctcaggcccaagctcagcttatacggcgaccttctggcatggatggagcaggtttcggaagaaagcgacaggctgtacctgcttgaattaaacagcgaagaagatatcgtcatagaggaattccatgaaaccgcctatgcgctctcggctccgtatatctatgaaaacaccgtcatatgggtgggcgccgacccgtcgggcagcggggacagcgccattttccgcgcagattttaccatggacgataactacaaccctgaagaacaggagcagggaggagagcagacctctgccatcagcgctgcgcccagtacgtccgcagccggacagactgcggcccaaagcacttctgcggcagaaaccgcctcccctacagcctcccccacagcctctgcctctgcctctgcctctgccacggcgcccgaaggaccgtggctccctctgccctcaagcgccgaaaacgagacgttaaaggtatactactatcctgcgggaatgtatgtgcatgaacccatgtacaacggccaggtagtggtatggatagataaaaacaaggcgcctgattccagcctgtatatgctggatttgacttcgggcgaggtttccctattgcagacgggggttacctcctacgcgctgggcactgattttgtagtcataaacagcaaccaagagatatgggcctattattacagggccaatactttaatacgggtttccagcgctgaccgggcttccattctgcctgaaactcagggccgggttgtggtctgggaagataaatcctccagcagttcaggggacgtttttatgtataatattctcggatag

SEQ ID NO: 2022 - DNA, 1623 bp, unclassified Clostridiales
atgagctataaggcgctttacagaaaatggcggcccgaatttttccgggacgtggtggggcaggaggtaatagtgcgcacactcagggcgcagataatgtccggccatatagcgcacgcttatctttttaccggtccgcggggtacgggcaagaccagcatggccaaaatatttgcgcgtgccattaactgccttgagcctgaagaaggggacgcctgcggcaaatgcggggtctgccttgcgcttaagggcgaggctatggatataatagagatggacgccgcaagcaataacggcgtggatgaaatacgtgcgctcagggagaatatagtttttccgccggcggtaggaagatataaagtgtatatcatagatgaagttcatatgctctctcagggcgcgttcaacgctcttttaaagactctggaagagccgcccgagcacgcggtgtttatacttgccactaccgaggtgcataaactccctgccactattctttcccggtgccagcgctttaactttaaaagcatcagcgtatcggatataagcgggtaccttaaaaaagtgcttaaggccagcggcgctgaatttgagccgcaggcagtggatttaatagcccgctcggccgaggggggcatgagggacgcgctgtccatagcggatatgtgtttgtcctactgcggcagcaatgttggatatgaggacgtagtaagcattttgggtacggcggacagggaattcatgtttaagtgtgccgacgcgcttataaattcggatgttaagggggcgttggacgcctgcgcgcaattaacggacagcggcggggatataggggtattcatgagggatatcatgagccacctttcggatgtgcttacggccaagctggcgggaaaagaggctttaacagccctgcctgacgatattgtttcccggctccttgagcagggtgaacgtgctgatgcggacaggcttatgcgcgcgattgaactgctggcgcaggcggagagcgagcttaagcagcattcccggcccaaggttatattaagcgccgttatggccagaatctgtactccccgtctggaagaggacgcgcttgcgttaagggaccgaatttccgtgctggaacaggaattaagcagcattaaagctaatggcatagagatgtcttctcggccggcgcagcctgcaaagaccgaggataaaaaagaggcttcatccaattcatccaaagcgcctgcggcagaaaaaaagatttcgggcgctgttaaggaaaccaagcaggatgctcagcagggtgaactttgggaggcgcttttagcaagaatgcgcaaaaatgccatgcccgtgtatatgacgctgaaaagcgccgagggcgggcgcaggcaggataatgcatatatagttatgttttctcctgagcatgagagcaagatgaaatttattaatggcaagacagaggcaatatcaaaggaactggaagctctgacgggggaaaaactggctgtgcgtactgagcagactgtccccgcacaaaagcaagaggagcaggatgagcttatcgcaaatataattgatatatttggagaagaaaatatacattttaaagattcggaggaatga

SEQ ID NO: 2023 - DNA, 2184 bp, unclassified Clostridiales
atgaacacggcaaaatggatatggattgataaaaacgggccgcgcaaaaactgctatgcgcgtttctttagagaatttttcataaaaccggatgaacaaaatccaacaggagaaatccgcatttcggtctcggataattacacgctgtacctgaacggtaattttatttcgtgcggtcaatataaggactatcccgacttaaagcattatgattgccttaagctggatccctttctccagataggaaaaaacgctctggccatagacgtatattatcagggagaacagagctttcaatgcgctcagtccacccccaggctctggtacgagctaaaggcaggcgatgaactttttacaagcgacgaaaacaccctttgccggctcctgactggataccggcagggggaaatggaaatggtaagcccccagcttgcctatacttttgaatatgacgcaagacgggaagcggaaaatcagcccgaagaagccaaccttaaaaattttgctcctgcagtcagcatcactgaccattggaatacccgtctctctccccgtcccataaataaaaccattatacagcccgctgttaattcctgtatcattgcccaaggcgtattgctggaaccaccccaaattgatggggagcagcaaagctcaacggcaacgcctgcaaagcgcatatattacgatttaacagcgccccgttacgttcaagagcttatagctctacccaaaacccatccccagcccaaggcctttgatgcgcccggcctgccccttccgtctgacggatacactttacaggctccggaaaactacgacggctgttatgttatagtagatttgtccgctgaatacgccggctacccgctaatagacataacagcgcccgaagggacagtgttggatataggttacggggaacatctggaggacggcagagtgcgctcttttatcggcgggcgtcattttgcttttcgctatacgacacgcgcaggcaggcaaaaatttattaattattttaagagaattgccggaaggtaccttgaaatgcatattcgttcaagcgagcagataaccgtacacaacctatcaattctgcctgaagaatatcctgttaagcgtgaaccatatcctatgggattaaccgacgctctaggcagacgcatctgggacatttcagccaggactcttgaattatgcatgcatgagcattatgaggactgtccatggcgggagcaggcactttacgccatggacgcccgcaatcaggctctgtcgggatattatgcctttaaagaatatgattttccggctgcttcatggatgctgatggcccaggctctgcttcctgacgggcagttaaggattacctcgcctacagacagcgagcttagaatccccagctttacatttgcttgggccgtagcctcggccgaattggctgaatacggcggtatagagcggataaaatatatgcccgctcttaatgaaatgctaaataaagctattgcgcgcagaaaaaatggtctgcttttaaatcccgaaggcgcggaatactggaatttttatgaatggtctaacggtcttgcagggcacctgggacaagctgtaccccaaagttatcctgaatgtccttataatgccttcttcagcggagctcttcaatcaggcgcatatctttgccgtacattaaagaatattgagcaagcggaaaaatatgaaaaggtaaataaagaactaaaaaaagccttttgcattttctgggatgaggacgcccaggcttaccgcacaggagaagcaggtgatggacggccatactctgagttaacacaggcattggctcttaaatttaatcttgtgccatcagaacgggcccaaaagctccgaaagcgtctagcccagcaagataatggtcttgagcctataactctaagccactatatttataaaatagacgccttaatgcaggaaccagatatatatttcaatactgtatacaatgatattttaaagatatggggcagcatgctttttaaaggcgcaacttccttctgggaaacactggatggggcaaatgcatttgacaaagcgggcagtctttgtcatggatggagcgcagcgccaatatatttctttggcaaatggatggatgaaaacaatctgtttaacattaaaagttag

SEQ ID NO: 2024 - DNA, 2097 bp, unclassified Clostridiales
atgaaacagaaatatttcagtataaatcttttctgggatttctttaagcaaataaaactgacggggataattctaaccgcagtattatgcataattacggccgtacccactttggcacaatacattacaaacggcagatatataaacgaggccgtgcagatatcccaggtaactcccgtgctctattttgtaatatactttattcccataatatacactgcgggcatattcaaatttctcaataaacgccgggacagcgatttttaccacagtttgccccctacacgcctgtgcatgtatttttcaggctgtctggcctccttctgctggagcctcataacaatcatatcaatggtgcttataggctatctgagccttattatatgcagtctgagctgtccggctgtttatataggctatttaacagcttacaacgccgttgtcgcccttataataacgggctgcgcctgcatagcgctcagcgccacaggcactctgcttcccggattgtgccttacattgattataatgttcctgccccgtttaatacttaccctgattaatatcatggtgcgcgatcagtccataatagccagcgcgcttaatgacggcctgctgtttaaccagaactataattttgttactgcgcctctcttcagtgcaatagcgtcaggcaattcaaacgcagccactttgcccgcttttgcaggcggatatatatataccggcgtccttggacttatatatatcctgctcggagccttggcttttcgggccagaaagagtgaaagcgccgaaaagagcgctcccaacagagctttgcagcatatttacaggcttttaatatccctgcctaccctgctggccgctgcggtattaataacctccaacagtgacgaaagcctgatagtaatactaattgttttatcggtaattatctattttgtatatgaagcaataaccaccaaaagctttaaaagcatgctcaaagccgcgccgcttttcctggccgatatcgcagtatgcgctatagtctgcctggcctcatacggaatcagccagaatatacttaacgatactccgcaggcagatgaagtgaatcatattgagataaacgtatcaaacagtgatggatactatgtaactccttcctatactcaggcattgcaggccactatagaatacaaaaacaaggatattgtttctcttgcgtgcgaacagctggataaaaccgcgcagactgccaaggcaatcaagaatgacccccgcagtcccgaacatatctccggccgcagcgttaccttcgtattaaactcaggtactaaaataacacgcactgtagatttcgggagcgctgcagcccagtttgaaaacctgctttggagcgagccggcttatgtggaaaatcttattaagctgcctagtgactcccagatatccagtataggcagttactcaacagtaattttgactcaggaccagttccgggagctgtgggagagctataaagcggaatatgcatcgctgtccaacgaggctaaggcagaggcaaaaacgcaggattattccagttcgcctttctatattaaccttacaggaactgttggtttaaccgtatggagcgacagatatgccatcacctcattaactcccaatacgtttaatatggctgcccaatatgccaaccagcagcagcctatcagccaatttaaagaaaagctccaatcagttcaagaaattacggagcaagccggcaactatgaggttaatatagatataggcttttataacacctcgcagctggatatagaggatgaaaacctggccgcgatgttccagggaggatactctactaccatttcttcttatcatgaagaatacttgcccgttatggaaatcttaaataactgcacaatgtccgaagccaagcctgatcagcctgttttaactttagatcttatgctctacgagcaggacgtggaatacggctacagcgtgcgctcagatgaaagccatgctgttgtaagcatagaccaggaaagccttacctctcttattaacctgcttttccagcagcaaagcattaacgcggcataa

SEQ ID NO: 2025 - DNA, 1059 bp, unclassified Clostridiales
atgaaaaatattgttttgcttaaaggagacggcataggccctgaaatagctgcgcaggcagttaaggtcctttctgttttagacgggtttaatattgatgaaaaggatttcgggggctgcgctattgataaaacgggcgaacctctgccccaaagcactcttaaagcggccttaagcgcagatgcggtattgcttggagctgtaggtgggcctaaatgggactcctgccctaaaaggccggaagcgggtcttttaggcctgcgcgccgcgcttaaggcttatgctaatctccggcccgccgttatttatgaggatttaaagcatatatcccctcttaaggatgagataatttcgcgcggagtagatataatggtggtgcgcgagctgacgggcggcatatatttcggcaaaaggggccgcggaacagaagagggcggggagtatgcctatgatactgaaaaatattccgcagcggagattgaacgcatagctcgtttggcttttgacatatcccttaagcgtaataaacgggtgtgcagcgtggataaggccaatgtgctggaaagttcgcggctgtggcggagtacggttcaaaaggtggctaaggattatccggaggtagaattggagcatatgtatgtggataatgcttcaatgcagcttgtacgcgacccggcccagtttgacgtgattttaacttccaatatgtttggggatattctctcggatgaagccagcatgctcacaggttccataggcatgctcccttcggccagcctgggcgggcaaaccggtctttatgagcccattcacggttcggcccccgatatagccgggcagaatatagctaatcccataggtatggtgctttcagttgctatgatgcttaaatattcttttaatatggataatgagagcgcgctgctggaaaaggcggtcaatatggctgtttcgggtgcgcgcaccaaagatatctgcggcggcggaaagagtgtgggctgcgaagaaatgggcgacattatagcgcataattttgagcggctgctcaggggagaataa

SEQ ID NO: 2026 - DNA, 1950 bp, unclassified Clostridiales
atgaaaaagctattcattgtcctaatgactctggtcgttttgggcacctgcgtatcctgcgggaaaaacccttccgaaacggccggaccaactgaaggagcgctcacacccggagcctccctggaacagacatctgaaccgactgaaacactccagaatacctcaagcgccacacccgcgcccacacctacgcccaatgaacctgaatatctgggctataatgcgaacaatatcgtgggagtggacagatacggacgtacttttgacgtcatagggggagaacgggacaacaagcaggtaggaatatttttctggctgtggctgggcgtagagagccacggaggcggttacggacggttcgccggagtatacgacgccacaaaaattgtagaagaatacggtttggaaaccatgtttatgcaagagaacccagtagacgaggacgggaatcccatcagtccaaacgggcaggcgcactggtggggagaacctctttggggctattaccgttcagacgatgaatatgtgatacgcaagcaaatggagcttttaaccattgcgggtatagactttatctattttgacacaaccaacgccataacctacaggccgtcctacatacccattctgaaggtaatagacgaaatgctcaaggagggctgggacgcacccaaggtagtattctacacgcattcccgctccatgcagaccgcgcgcagcctgtataacgagctttattcgcgggagctttatcccgacacctggtaccgggtagacggaaagccgttaataatcgcttatactgacccaaaggacgatttagccgaagcgcagggccgcggagacaccagctacaaaccgcaggagttctcccaggagatactggactttttcaccttcaagcgtccgcagtggccgtcagacccgatatatccggatggcttcccttgggtggaatggaagtatcctcagcctaaacacggtgacgtaatgaatgtaaccgtagcggcgcatcccaatgtgcccatgtccctgaacctgatcaatgatctggtgggaggcaactggaagaattggggccgcggatacaatcccttaacaggcgttaatgaatccgacaaggcagaagaaggtcagcttttccaatacttctgggatgaagctattgccgaagacccggatataataagcgtaggcggctggaacgaatgggtagcatataagcagtggtatatgaaccactacatgctgtgcgacgcagcgtctatggaattttcacgcgatatagaaatgatgaagggcggctacgaggattccttctatatgcagctgatacagaatatacgggcatataaggggacggcctctgaagccacagccttcagcaagagcatagatataaccggagagttatcgcaatgggacgacgttaccaacgtataccgcgccataggcacgacaaattacggacgtaattccacagactgcgccggacaggagcagtatgttatggaagcgcccagaaataatctgcaggagatacgcgtaacgcacgatgatgaaaacctgtatttttacatacgggctgaagaagccataaccggcagcggcagcaactggatgaacatatttataggcactggctctccctcccttaaagggtggaacggttatgaatatgtaatcaaccgcaatgtatcggacagcacgggcagcatagaaaagcttaacgaagattataccggtcaaaacgtaggcgaagccaggctggtgcagaccggggaatatctgctggtagaagttccccgcgaagcagtaggcatggcggacagcgcagaattctatttcaaagtagctgacgatgtagagaacaccgacgatattatggattattatgtaacaggcaagagcctgcccatgggccggctgagctacaaatacaacggctaa

SEQ ID NO: 2027 - DNA, 1479 bp, unclassified Clostridiales
atggaacgctttgacttgtacaaagatatagcacagagaaccaacggggatatatatatcggcgtggtgggccctgtgcgcacaggcaaatccacctttatcaaacggtttatggatttgctggtactgcctaatatctccaacgaatataccaaagagcgcgccatagatgagcttccgcaaagcggctcagggcgcacaataatgaccacacagcccaagtttgtcccaaatgaggctgtaacagtaaatctggatgaaaacactcagtttaacgtccggctggtggactgcgttggatatcttatagacggcgtactgggacatatggaagatgatacccccagaatggtgcgcacgccctggtcggataccgaaataccctttgaaaaagcggccgagatgggcacccagaaggttataaacgagcattcaaccatagggctggtagtgacaaccgacggcagcataaacggccttccccgttcaggatacattgaagcggaagaaagagtagttgaagagctgcggcaaataggcaagccgtttataatagtcctgaacactaccgacttatattcggtggagactcaaaaactgcagcttgctctggaggaaaaatacgatgttcccgtaattcctctggacgtacttaatatgtcccttgaggatttgcagtcggtattggaaagagtcttgtttgaatttcccctgcgccgcataaacatttcactgccccgctgggtacaggcgctctctcccgaacactatcttatagacgagcttttaacaggactgcgcgagcgcgccgcagagcagcataaaatgcgcgactaccccgatctgctggggctgtttgacgaatcagaaaacataaagggctttaatgttgacaaagttgaattaggcacgggcagcatagaatacggcgtagaggtcgcacccgaattgttctataaagttctgggcgacgaatgcggctgtgaaattaagggagatttccatcttatcagccttatgcgggatttagtagaagcaaagcgggaatacgaccgcgttgctgaagccctcaaatgcgccgaggctaccggatacggagtagtggcgccttctatggatgaaatggtcctggaagaacccgaaatggtcaagcagggttcgcgtttcggcgttaagcttaaggccagcgcgccctcgctgcatattatcaaagtagacgtaaagacagaagtcaatcccattgtcggcagcgaaaagcagagcgaggaaatggttaaatacctgcttgcagaatttgaaaacgataccgcacgcatttgggacagcaacctgtttggaaaaagccttcatgaattggtacaggaagggctttcagggaaattgctccgaatgcccgaaggcgcgcagagaaaaatgcaaatggctctgcagcgcattataaacgaaggcagcggaggacttatctgcatacttctttaa

SEQ ID NO: 2028 - DNA, 1569 bp, unclassified Clostridiales
atgaaaaataagaaatttctgccctttataatatcagctgttgttattttggtgggcattgtttcattaattgcccaggggcttaatctcggcatagatttcagaagcggcaaaatagtaactatagatatgggccgcgaattggatacccaggtcttagaggatatggtaactgctgcgggcggcaaggatgcggttattaagagactgggcgatacggcctacagtatacagttctatgttgatgaagaagagtttgcgaacatgaccccctctgcgcagtccacgcagtcagcacggccttctgccagcccttcttcagggcagactgctcaaaataccggcagcccttctgctgctgccagtcccgacagcactggaacagctgaaaatacggcgggagagtcgggctctgcttcggcttctgcttcgacttccgcctccggctcggcctcctcttctgcaaattcaagcgacgttgtaaataccaacggctacagcattgtggagaacaggctggccaatatgctttacgactattaccgcagcatgctttcgcctgaatatactgttgaaaatggaacaatgacatacaggctggactttggcgtaagcataaatcaggatgcttataatgaagcagtggaaagctttttaaacaattatacttctgattttacccttacaaacggcacccaggctgaggtgcagataaaccttaacagcatgtcgttagaaaatatgctcagcgaattgctgctttacaatttgaaaagcgaaacgggcaattttgatttagtgtttgaatcctatgatgtagaagagggtactattactgcttctgccgttctgggcgaggattttgatacgcaggctgttatagatacggtagtagccgttgcaggagagagcgcttcggtgacatttgacggggacagagtaaatctttccctttcggttaacgacgctgacaaagaggctgttacagcccagctgcttactgccaaaatgagcgagctgctgagctttgaatcggagggctcggattccacagtcagcagcgaagtaacggctgcggctttctggacggttctgcttgcggcagtctgcatgctgatttatatctggttccgttttgagctttattcagggcttacggccattatcgggcttctgcatgatgtttttgtaactataacggttatgtccctgttccaggtacagcttaacgcgacctttatagcggctctgctgaccataataggttatgtcatcaataataccatcattatatttgaccgcataagggagaacagcaaaaagctcacgggtatgtctaattatgaagtagcccgcctgagcgttaagcagtcgttaaggcggacgctgtttgcttccattaccaccttgctgactgttggtgtgctgtttattctgggcgttgcttctgtacagaatttcaccctgcccattatagttggtattctgtccagtatgtatacctcaaccctgcttaatccgcttatatggtccttatttaaggatagggcggacaagaaaaatagctga

SEQ ID NO: 2029 - DNA, 1644 bp, unclassified Clostridiales
atgaaaaaactttttgccgccctgctgggagtattgatgctctccctcgtattaaccggcattgctcttgccgacccggtaacgcaggacgatataacctttgaagtaaacgtaacgccttcgggcatgctgccgccggccgcaggtacaaccgaagagataattgtaacggtagtaataacaaacaatactcccaacccgctgacggatatacagttgttcataaggaatgcagaagatccaaacggaacgctggccgaaatacccgcttacggttcagacgctacaggtgaaatagttgtaaggatgaatatctctgcaagcgacattggagttgatattccttttaatgtggattatactaccgcaggagaatcccatacctataacggcactttccgcgtagaagagattcagtctcagaccagcgccacaatatccgccgttgcagtagtaaacggcgagcgcaacgcaacaatggggccggacggggccagcgtatattttgaatacactattcacaataacggcaatgtaaatataacctccatttccataagtgaaaacatgaccgtaggcggctcatccaccaatacggcaattctgcacggcgacatttccgcccagaacccgcttgaacctgacgaaactgttacgataaccggccataccgctaatttgagcggagatataagggtatcccctgttctgctttacaacagttcttacgacagcggggaaagccaggcgagcgccgtaaccgttacaaaatatgcgcctcagctggaatttaccctgactgtcgcaaacaccaacgtaacctacggttcgtccaccaaactttattttaacgtaaccaatacgggaaacgtgacccttaacaatataagagtattgaacgaatccaacagagaggtgcgcaatgtctcttctcttacgccgggcaattccataagcggagaagtgagcataacggtaacaagcacacgcagctacaggtactcggtttcggcccagtctcctgacgggcaaagcgtaagcgccaatgaaagcgttactgtgaacatggtgcccctggagccgacagacatacagcttggcctgacggtttctgccgacaaagttcaattagacagtccgggcaccgttaccatcactatagaaattaccaaccggaacgctttcgagctgaacgacattcagattatggacagccgtgaccagcttatcaccaccatctccagcctgctcagcgatgcaaccgaaactatagagcatacaatggagcttagctattcggaggaaatatttgtctgcgcatatgtcccggtagagggcaattccgaaccgtctgagatagtatccaatatgataagcgttgaagtaagcggcggcgctgacgctacccccacagcttccccctcgcctacctcttctctttcacctaccgctaccggctccctttccccatccgcttcaggtgaaaccccgcaggagggtctgggcctcatagacatacttataataggatttgtggtaatactggttctggtggctatagcaatagcggcgcttgtgacaataaatgtcctggacaaaaagaaaaaagccaagaaccggcagatgaacaggaaaatcaagtaa

SEQ ID NO: 2030 - DNA, 1179 bp, unclassified Clostridiales
atgcttaggacggctcagtttatagatacttattttcctgttatagacggtgttataagaacggtatataactatgcttattatcttaacgagcagactgattactgctgcgtttttgctccgcggtacaagggctataaggatgacgattctccctttgacgtgtttcggacggcaggacttaaaataccctttataggctattcctattccatgcccaaattaagcaaggctgcatatgacgtaattaaaaccaaggatttcgatttgttccatgctcattcaccctttcaaatgggctattatgctctttctatgggtcataagatggagataccggtagttgctacttttcattccaaatattatgacgattttaagcgggtgacaaaaagcgaagtcatggcgcagctggtggtggataccatagttaaattctatgaaaaagtggattcggtctggtcggtaaacaggggaacggccggcaccctgcgcgactacggctataagggagacatatttgtaataaataacggcactgatatggtttatccggatgacgccgataagctcatagaggaagcccgcagccgctttggactgcctgaggataaaaagcttattctttttaccggacatttaatctggcagaaaaacctcaagctcattttggataccattaagctgctggccggggcgcgccaggattttttaatggtatttgtgggtacgggctataatgaaaaagagataaaaaaatatgctgaggaacttgaactggagccttatgtgcgttttctgggacagatagaggataggaagcttttgcagggcatgtatggcgccgcaacgctgtttttctttccctcggtatacgataacgcgccgctggtagtcagggaagcggcggtaatgaagctgccttctctgctggcggacgacgctaacgccgcagagggcgtagaggacggttcaaacggctttacggcgccgcctgaagcagaggatatgtttgccaagctgaacgctttgctggacgatttgccggctttaaagctggctggggagcgtgcgtcagaaaccataccgataccatgggaaaagcttgtttcagaagtggctgtgcagtatatgcgtatatgcgcggaatataaactgaagcataaaagcggtgaatag

SEQ ID NO: 2031 - DNA, 1584 bp, unclassified Clostridiales
atgagggcacctcaaaatgaaatagacaggcgcagaactttcgccataatatcccaccctgacgccggaaaaaccacgctgaccgaaaaactgctcttatacggaggcgccattcatctggccggttcggttaaagcacgaaaggcaagccggcacgctacaagcgactggatggaaattgaaaaacagcgcggcataagcgtcaccagttctgttatggcctttgattacgatggctacagaattaatattctggacactcccggccaccaggacttttcagaggacacttaccgcacccttatggcagcggacagcgccggaatgcttatagacgctgccaaaggcgtggaagcccagacgataaaactgtttaaagtctgctcggagcgcggaatacccatttttacattcataaacaagctggaccgcgcaggcaagcatccctttgaacttatggaggaattggaaaacgtactggggatacgctcctgtcccatcaactggcccataggcactgacggcgattttaagggcgtatataaccgcggcgaaaacaccatagagctctacagcggcggcagccacgggcagaaaaaggtagattctgtttcgggcgagattggggacgaaacctttaagcggcttttgggcgaacattaccataacaggcttatggaagaaatagagcttttggacgtcgccggcgaccccttagatatggacaaggttttaaacggcaggcttactcctcttttcttcggcagtgccatgaataatttcggggtggaatccttcctgaaaaaattccttagttttactctccctccctctccgcgcaaagctggaaacgagctgataacccccaaagacgaccgtttctcaggatttatatttaaaatccaggccaatatgaacccagcccatcgtgaccgcatagcctttatgcggatctgctcaggagtctttgaaaagggcatgacggtaaagcacgtcaatgcaggcaaggaaataaagctggctcaaccgcagcagtttatggcgcaggagcgcgaaagcgtggaaatcgcttatcccggcgatataataggattgtttgaccccgggatattcggcataggcgatacagtctgcacgggcgcgtccatattatttgacggtatacccctttttgcgcctgagcattttgcaagagtgtacactccggacacaatgaagcgcaagcagtttataaaaggtattgagcagctttcccaggagggcgctatacaggtattcaaggaaataaatataggccgtgaagagcttattgtaggagttgtgggcatgcttcagctggaagtgctgcaatacaggctcaaggcggaatataacgccgaagtcaatgtttcgggactgccgtataaatacgtccgctggataaagggagaatgggataccgcaaggctcaagctgtcctcctctgccaaaactgcacaagattcaaaaggcaggcctgttatattttttgaaaacgactggagcatacgctgggcgctggaaaacaacagcggcctggaactggccgatactatgcctagataa

SEQ ID NO: 2032 - DNA, 3462 bp, unclassified Clostridiales
atgccctcatttgaattgggactcaagcctcttgagccggttaaagatacgcgtatatgcgtttttcagcatactcatgtccacgtttcggaactttttcccaaagtatgcatgctcacatacgattttgaagaataccgctattcggaaatgctgctccttttaaaaatgataataggcctgggggaaaatcatgtttggctgaatcaggagaacatgacggattacagcgctcagaatatccccggcggcctggctggaaatgggagatttaataatattcctatatctgtcgaagcttatcccatgattgacgatagggatgtgcttaagcgccagggcggcattttgctgcatataaaggcgggagcgccggtatggctgaaatgctgtaccggaccgcttgtctctttaatgggttatccgcctaagggggaagaacaaacgcttgatatgtgtcagggctgcgcggagatggtgggagacacactgtatttatacagcaataagcatcccctgcatataggtataagagcaaatgcgccctttgatgttaaagaaatgcctgcggctgatggcgttaaggaaggctatggccttgcctgctttgcttcgggcgaggtatggctaacggcaggtttttcagataaaaaagaagaggccctgaagcttgccgctcaagaaaccgccgccggtatagaaaaggtgcgcgggtattataaggaaatgctggataactggtatataaaaacgcccgatgaaaacctggacgaagcctttatgcatgcaaggctgaatgtggaatacgcctggttcaggccgtttggatgggtggaagcgctgcatcactggataagcatgtggcatatggagcatactgccgcagaggaatgggcgggcaattatcagcggtcccgcgaaatatttatttcccagcttgaacgcctgcttaacggcgacgaggtgcctgaattgtccgcgccgggctttgcccgcaaggaatggggcggggataacccatatttcttcaggggggtggagcattaccttaaaatgacgggcgatattgaatttgcgcgccaggcggaaccgtatatgcacaaaattctggctcagacctttaaagaatatgacccgctcaaaacaggcgttattggcttcggcacccaattaggcaaccaggaggattttctggctacgcatggccccggcagcggctcaggctgcgagggagcgcatatgctcagggtcatggctatggtggaaaatctgcttggcaacagaaaagcgtcagaaaaatatgagcagtatgccagagccgtccagcaaaaggtttatgaccaattctggatggaggatgtaggacggtttgcctggtataaggacgcgctggggcagatgcgcctggaagcgccctatcacagcatttgctatccaatactttataatatgctctcggacagggaaaaagtcagcagcatagaccatctgctgcaccgcttaagcggcccttcgggcgaaatgtatatatccaatcttttcggcggtcactgctactatgcggtcagcacctggggcatgcagtgcggcggcaatatgcagtattttgccgccgcgtcctatgcgcgcctgggcatgaataatcaggctgtgcgtccgcttaaattcattgcggatattgtttcctcaaggcataggggggcgtttcctgaaacagctaatgatgcggataaagcctatttcagccctgccgcctgcatgtattcgcagggcataatagagggaattttcgggctggacagaaatgttcctgcaaataaaacgaccgtttccccctgttttccggataattgggaacatgcggaaataaagcttcccggtgtaaacataaaatactgccgtaaaaaggatattcataattttgaaatcaggctggaggatagaacccaaaaacactttatctggcgcttgcctccgtattcggcaattacagcggaaattaacggccggcccgcgcaagtgacaactcattcccgctgcggctggtttgaggctgaaatatcattgggctctgaagaattttccagcctccagattcaatatacgcctgtttcttttgccttggaaaagccggactgcgcttcagtgggaagcgagtatgagcttaaagtaaaaggagcggagctgataggccttaatgaccccgccggagtgtttcggggcgtgcgcttgaataagaatgccatgaatgcgcagattggggaaaatctgctgaaaaaatatcagtcctacggctggttcggccttgtcaattttgcccgccacaccttttttgtcactcttaaagcagagggtgtgctgtttgaatatcccgtgcatttaaccgtactgccccaatatgtcctgcatgccctccccctttgcggaaatagccgtacccttgacgccgaagcatttagagaagcgccgggtcggctgaacgggaatgacggttctcaaagcaccgccaatgaaaaaagcatcctaaccctgcaaattatagattatacgggtcgggaaaatactgcttcaaaaagggaagtgagcctgctcctgggcggagggacagcaaaaaccacggcgctctttaaaaagtatgagccggttaaaattgattttgagcttaataagtcacaattagaaaatctgacccccggccgcaataagggcgctctgctgatagatgggcgccgggaggaattttatatggagtaccgcccgtccggggatatggccttttttattcctctgcctgaagataagctcaaacctgcgctttactggaacgagataggcaaaaatacttctccgggctccacgatatactgcataacgcctgaaaatatcctccaggatgtgtttgacggctgcgaggtgctggagaatatgccgggcgtgccttttagaataaataaaaagggatttttgcccgtatcctcccgcaatgagcggtatgcctctataaatcttaagggagtggaagccagaaaggtgtatgtgctgctcagcgcctttataactaatcagcacgctttcagccagcccttctatatggaattggaggcggagagccggggagaatatttcccgcccgtatacggagctcagctgagcttccccggcaatctggatatagggctttcggggaggggcaattacggcttcccaacttacgttgaagaacagccgcgggatgttttgcctgcgcttccgtcaagagaggatgcggattatcctgaggcttatcctccgggctatccccagcatctgctttggaaccagtttaaggccttccaggtgggggagacggttttcagtgttattgaattggatctggaggaaaaacggcctttaaaggaactgcgaatatgggtgcaggattccaatgcggccatgggtatatatgccttgtctgcggtatag

SEQ ID NO: 2033 - DNA, 3021 bp, unclassified Clostridiales
atgcctcgaaaaaaaggcggttcaaatagatacccccatttaaataaaaacaacggtcagaacgaatatgaatttcagcccggccaggacgcgtttatagaggatgatttttccgaaaaagaggaagagatttttattgagcataatcttcctcattcctcttccgcccaaaaaagcgaacggcgtccctctatagctgacgaagaaatacctgacgaagtgccggtggacgctgaaaaaataacaatacgccctcatagctcgcttgaagattcgggcagtatttatatccaggacgagcaaggcggtacttttatccaggagcagcttgcgcatgacgctgcttctaacagcgtttcaacaaagcgccgcggggagaaaaagccaaaagaaaaaaaagagcgatccaaggatgaaatatccataggcgaccttttcagcaaacgcacaaagccccgcaattactttataaacttgatttttaaaacggggaagtattttgtgattctgctcctggtatgcgggttcagcggtctcggagccgttctcggactggccagaggatacgttgaatccctgcccgatattgattttggcagcataaccgatttagaccaaactacttatatctatgatatcaacggtgaactgctgaccagccgctacggcagcgagaaccgcgagtgggcggatatagaagaaattcccgaaatgctccagaacgcctttatcgccattgaggacgtccgtttcaggcggcacataggggttgactttaagcggcttataggctcttttatactcaatatgtccagcgactccattcagggaggcagcaccataacccagcagcttataaaaaacaccctgctttctactgagcagacctacaagcgcaaaatacgcgaagcctatctggctattcagcttgaacagcaatgtacaaaagatgaaatactggaggcttacttaaacaccattcctctggggggaagtatttacggcgttaaaacggcggcgatggactacttcgggaaggagctttccgagctgaccttgagagaatgcgcaactctggccggattgacgcagaatccctccagatataatccgcgccttaattattattcccgcaatactccagagcgcacggacgaccgcgccaacaacgtgctcaacgaaatgtatgaaaacgggtttataacactggccgaatacgacgcagctatggcagaccagctggtagtattagaggaatctcccctcaaggatcagaacgaaatgctggcctttgtggaatactgcatctatgacgtcattacccagctccttaagcaggaaggattagaggataccagcgccaaccggagcgcaatggaatccaaaatacgcaccgaagggtaccatatatataccaccatagaccctgaaaaacaaaaggcggccgaacaggcagtatataattacacaaattatccctccatgcgctatgatgaggataaatataccattcaagggcgcaatccggacggcacaattataacccttgtccagcctcaggcctcctcggttgtcattgattaccgtacagggtatatagttgcaatggtaggaggcaggacggccccagtaaatcaaaaggaatataaccgtgcgtaccaatccacaatgccggtaggctcgtccataaagcccataacagtatacggacccgcgcttgacttgggcaaatcggcgggcacaatttattatgacacgcgtgcgcctattgaaaactggggaacggaaaaaggatatccctctaataacggcgaaaccggatataccggctcggtgacaatgcggtatgcagtccatcgctctcttaacacagtggcggcgcaggctttaatgtatgacgtgggaattgacacggccgtaagctatttagaagcaatgaatgtagaccccgaccatatcaacgcggacgggccggggctggctcttggaaccagcgggctcacccctcttgaaatggccgcatgctttgccaccatcgctaatatgggcacctatttgcagcccataagttttacaaagataacagaccgccagggaaatgttattctggacatggtggccgaacaggaaacaaagcagatatataagccctcttcagcctatcagctcatagatatgctctatacagccctcaacggcggaggctctgcgcagggcgcgcttatggacgggcagacagtctgcggcaaaacgggtaccaacagcgattaccgcggcgtttattttgcaggctttacaggatattatgtaggctcggtatggataggcagcgacgcatataaaccgctcaggaacgctcagggcggaacatatgccgctccgttatggaaggatataatggagccactgcatgaagggctgcctaataaggccgtaactgaagttaccatggaagaattgggcattgaagaatttaagttctgcaagtattcgggcaagcttgccaccagcgcctgccctgagactgtaaccgatattggcgtagccgccgatgtactggcagatccgtgcgactgccacaggtctgttacaatatgcctggacaccaactgcatagccacagactactgtcccaatacccggacaatttcggcactaatacctcccacttccgggcagctggccaatatatattataactatcctgaaatataccggaggtattactcggacaacgtgcttaccatcaacacggagtgctcggtccatacggcgcagtggcagggcgagcaggaacttaaggaacagcttcacttcaatgcccaaagactgctccagagaagcgaacagtatgcgccgcaggtagaggatcctgccagctatcagcagctgcttgcgcttactgaatcgttaagaaacgcttataacaattatgatacagtaagctatgattactacagaagctgctataacgacttatacaatctgattatatccctgggattcccgctggacttctga

SEQ ID NO: 2034 - DNA, 1272 bp, unclassified Clostridiales
atgaaagacattttgataaaaaatgcgcatatagttacaatggatggaagcgccgtatataagaacggctgcgttttaatcagcggatccacgataaaatatgtcggtgataatttgccgcaaagctgtgacgctgaagttatagatgcgcgcggcggcatagttatgcccggactggttaacgctcatactcatcttggaatgagctgcttcagaagcttcgcttcagatttgcctttggataagtggctggagcaaattttcaaggtagaggataagctgaatgatgagttgatttaccaatttgccctgatagcctgcgctgaagcgctggaaaggggcagcgcctgtgtgaatgatatgtacctggatattaccggtacagccgaagcttgcttgtccagcggcataagagcgtatgtgagccggaatgttgtggatacggacggccctgagggtttaaagcgccggctgaaagaactggagaggatgcatgagctttacgacggcaaagagggcaggctgcatgtgctggcctcggcccatgccgaatatacctgctctgaaaatgccgtcagggaagttgcaagccgcgctaaaagctggggcagccccttttatatacatgcaagcgagactgtttcagaagttaagggctgccttgagagacatggcgtttcccctataaaatggcttgcgggcctgggactgcctgaaagaactatagctgctcattgtgtggttgtaagcagggaggatatgcagataatgcttgagcataacataatccccgtgcacaatcccgtgagcaatttaaagctggccagcggcatagcgcctgtaaaagctatgctggaaacgggtataaagcctaccctgggaacagacggcaacggcagcaataataatctggatatgttcagggagatatttactgcgtctatccttcaaaagggctttactatggacgctcaggcgctggatgcatattcggctgttaaaatggctactgttaacggcgctgacgccttaggctataagggcggcatgcttaaagaaggatatgcggctgatgtcctggtgctttatccgtcgttatttttgcaaccggtccatgacgtctatggcattattgcttacagcgctgaaagctgtgatgtgaggtacaatattgtaaacgggcgtattttggttaaagaaggggaatgcctgagcgtggataaggaacggtgcgccgcgcggctgcgtgagcttgccggacagcttttttaa

SEQ ID NO: 2035 - DNA, 2217 bp, unclassified Clostridiales
atgatgtttacccatgcccggcccgtatgggcgcaccatcaaagagaaaatctgcctgacggggatatgaatattaccctctgttttaagacggtgcttcccgccggcgaatacagggcgcttgtcgccgcggctgacgtgtatcagctgtatatcgggggcaggtttaccgccgccggcccagcgcgggcggcccattcctttgcccgctgcgaccgcctgaattttgtcctggccgaggaatccgccgttgtgtttgttgtttcggcctataatgtatataactactgctatattaagcagccgggctttttctgctgtgaaatttttgagggggacaatttagccgcggctacatgcgcgggcgggctttctgaggataaaattcaggaaggcgcagttaataggggacctgcagacggcgcctttggggagactgttttaagcgggccaaatgccgctttggacgggggagaggccgtattcggcgcgcgcggtttctgcgcccgcttaatggaggagcgcgtgcacagggtggaccgttattcctatcagcggccctatgtggaaacctatcattactcgtctttgctggaacagtttatgcgctcgacccaaaatgaggagggccttgaattgtttgagagggctcttcccaagctgctggaaagggaggcgttttacccagactacgccgcgcacgctcccgtccgcttcataaatcagggcactggagcagtcaatcctgaaaatgcggatatgtcacaggattattttatgatacagactccggacataccctttgaaagcttcgggacggatttggaggagcgcatctgcggcgagataaggcgcatgaagtttaatattgaaaaggagctgaacgcgcccttcggggatttttcccttaaagcaggcagctttttaagctgcgagatggagaggaacttaacgggctttatctgctgcgatatagaatgcccgcgcaggagcgtgataagctttttatttgacgagatacttaccgacggggatatagacccgctgcgcctgggctgcgtgaaccatcttaagcttactcttgaggcgggccggtaccgtttcgtatccatggagccttatacctttaaatacctcaaaacggcggtatttgaaggagaatgcgtagttaaggacctgcacatcaaggaatatgcttttcctgcggcggagataaaaaattcgcttgagctttcgggaaaaatgcaggaaatttaccaggcggggatagagaccttcaggcagaatacgctggacgtatatatggactgcccctcccgcgagcggggcggctggctgtgtgacagctttttcacctcacgggtggaatttctgctcaccggcgcgtgtcgcgtagaaaaggcatttctggagaattttatcctgcctgaagattttagggacgtgccccgcggcatgctgcccatgtgctatccttccgaccatctcaacaggcgctttatccccaactgggccatgtttttcgtgctggagctgcgcgagtatcttgagaggtctgaggatgctgaattagtgcgcagggcggcgcccaggctggaagggctgctggaatatttcaggggatttgaaaacagcgatggcctgcttgagaatctggacggctgggtgtttgtggagtggtcgcgggccaatgacgactgccttgttaagggtataaactatcccagcaatatgctttatgcgcgcatgctggaggacgcctcctatttgcttaacaagcctgaactgatgcgcaagtccctcaggctcaagcgggtcatcagggagcgggcgtataacggattgttctttagggataacgccgcggttgacgaatgcaccgaagtgtgccagtattatgccttttttacgcatgtggcagacagagaaaactatccggagctttataatacgcttaaaacccaattcggccctggccgcaaagagaataacccttatccggaggttgcctttgccaacgcctttataggcaattatctgcgcctggaaatgctttcagagaacaatgaaagagagcaggttttaagggagatagaggggtattttgcggatatggctgaaaagacgggcactctctgggagcatgacagcccgcaggccagctgcaatcacggctttgcttcccatgtgctgtattggctgtttaaattctgctga

SEQ ID NO: 2036 - DNA, 1791 bp, unclassified Clostridiales
atgactttggacgagcttagagaaaaatggttcagcttttggaaggaacgcggccacgctgttattcagagcgcttcgcttatacctgaaaacgaccccaccgtgctttttaccacggcgggcatgcaccccttagttccctatctgctcggccagggccatccggccggaacccgcctgtgcgacgtgcagaaatgcgtgcgcaccggcgatatagacgacgtcggcgacgccagccaccttactttttttgaaatgctgggcaactggtcgctgggagactattttaagaaagaggccatacactggtcctgggaatttttaacgggcaaggattatctgggaatagagcccgaaagattggctttttcagtttttgccggggatgaggactgcccaagggacgaagaatccgcccgctactgggaggaatgcggagtacctaaagaacgcatcttctatctccccaaggaaaataactggtggcccgcggcaggcatacccggaccctgcggccctgatacagaaatgtttatagatacaggcaagcctgcctgcggcccggattgctcccccgcctgcgactgcggcaaatatctcgaaatatggaacaatgtttttatgcagtataaccgttctgccgacggtgttttaactcccctggaacgcaagaacgtggataccggcatgggcctggagcgcaccatatgcgtgctgaccggaaaaaaatctgtttacgaaaccgaagccttcagcgatattctggataaaatagccgagctttcgggcaaaagctacggccagagcgaagagattacccgtgctttcagaataatagcagaccatatccgctgctcggcatttattcttggcgaccagcgaggagttactcccagcaacgttgaccaggggtatgtgctccgccgcctgatacgccgcagcgtgcgctacggcaaaactcttgagctgcccgccggctcatacagcaaaattgcagaagtaataataaataaataccagcaccaatatcccgaactggcccagaaccgcgaaagaattattaaagagcttaatctggaagaggagcgctttgcccgcacccttaatcagggacttaaggaatataataaggccgccgcttccctccagcccggcgactgcatagacggcctcactgccttccacctttatgataccttcggcttccctatagaaatgaccgtggaattggcgcgtgaaaataatataaaagtagatactgcgggatttgaggaagcctttaaggagcatcaggccaagagccacgccggagcgcagcagcgctttaagggcggattggccgaccaaagcgagcagaccgcccggctccatactgccacccatctgctgcatgcggctctgcgcaaggtgctgggcacccaggtagcgcagaagggcagcaatataaccccagagaggctcaggtttgacttttcctttgagcggaaaatgactcctgaagaaataaagcaggtagaagagctggtcaacgaggccattaaggcggacgcccccataatctgcgaagaaatgccccttgaacaggcaaaacagagcggcgcaatcggcctgtttgaaagcaaatacggcgaaaatgtaaaagtttatacaatggggaacttttccaaggaaatctgcggcggtccgcacgcacacagcaccggcgagctgataagctttaaaattaaaaaagaggaaagctcttcagcaggcgtgcgccgcataaaagctgtgataggtgcacagcaatga

SEQ ID NO: 2037 - DNA, 2697 bp, unclassified Clostridiales
atgtccgatataaagcttttatgcgaatatgcttccacccctatagacgttcaaacccagcgtccccgcttttcctggatgcttaaggacaataatgtcccagagcagctatcctacagaataaccgtgtcccaggacccggaatttacccagcttgtctgggacagcggcactgtccaaagcaaggattcgttaggaattgtgtataacggttccccccttgaggactgcacgcagtatttctggcgggcagaaatcagctgccgcggcggcttcagcattgaaggcgtttcccactttgaaactgcaatatcccccggagcgcagtggcagggtcaatggatttcccacccccagccgctggacggctattccatactgctgcgccgggaaatatgcctggacagtttgccgcaaaaggcgcgcgcctacatctgcggcctgggcctttaccgccttcatataaacggcgtgctggccagcgaccgctgtctggaacccgcctggactaattataataaaaccgtactttactcagtactggatataactccctatctgcacgaaggcaagaatgcgataatggtggaattgggcaagggcacttacggccagcaccataccagcttcaaggtgctggccggcttccccggcccgtatgtccagtccccccgtctgctggctcaattcaatataaccatgcccaatggccggaagctggtattgggcacagaaaaagaaaactggcacgcctcctttggagatatatatgaaaacgacctttacgacggcgaagtatgcgatggaagaataaatatcttccattattccctgcctgaatttgacgcggagcaggcgggctggcccaaggccgctgaagcgcccgcgccgggcggggtgctgcgcgcctcccgcgttcagcccataaggataacaaaaaccctggaacccgtaagcataaccaggatatccaaataccgctgcatagtggatttcggacagaatttcgccggctgggtgcgcttgaaaatgaagggcctgcctcacaaacgggtaactcttaagcacggcgaagtgctgaacgaggccggctgggtcagcacggacaacctgcgggacgcgcgcgcaatagacaattatgttttaaaaggggaagattacgaaacctacgagccccgctttacctatcacggcttcagatatgttgaaatcctggccgaagagcctctggaggacttcgagattgttggctgcgccgtaaacagcgacgtagaacaaacaggcatgtttaaatgcagcaataagcttataaataaaatacagcaggctgtaatatggaccgaacgctcaaatcttcatggtatgcccgacgcctgcgcccagagagacgagcgcatggcctggctgaacgacatggccataagatgcgaagaatccatgtataataacaatatgctcccaatatatgaaaaatggatggaggatatttttaacgaacagaaggagacgggaagcattcccgataccgctccctttatctatggcgggaaccccgcttatcatgtttccagcatatatgtcatactgccctggcttatatatgtgcattacggagataagcgcataatggagcaatattaccagccggtcaaaaaatatgtagagtttttggccacacagcggggagaagacggccttatcggccagccctattacggcgactgggtagcgcccctggaagaatgctacaccggcttcgcctataacgccgttcccaagaacattcccgaaaaactcataaccacgggatatctttactacgactgcctattgatgaacaagatggccgagctcacaggccatcaggaggatatacccctttatgaaaaaaccgcgcaggaagcggcgcaggccataaacgcgcacctgcttgcagaagacggatatatccctggttcgcaggcggccaatgccttccctgtatttctggacatagtgccggaggataaaaagcaggccgttgcaaatagtctgcttaaagaagtgcgcaggcgcaaatatcatataaccaccggcaaccagaccacaaaatatcttttcgaggcgcttgaccggctggaaatggatgacgctgcatataagataatgtcttcagacacctatcccagcctgggctatatgataaagaacggagcaaccacgatatgggagagatgggaaaacgaaataggctccagcatgaattcccacaatcagcccatgctgtgcgcgtgcacctcctggctttacaaatctttaggcggcatccgcctggacggacagcccgacgggcttaataccatcgttatttcccctgttttccccaaagggctaaaaagcgcgcaggcctcttataattccttcaaagggatgataaccagccaatggaagcgggaagaggatgaaataaccctcaaggtgtccattccctggaacacctccgctctgcttgttctgcccgataactgcaaagccgagataaagcggacctcttctgcaagcggttccactgatgaaccttcctccctccggcccgcagacgctcaggaccataccgccagaaaagggcttttccccctgcgcggagagggtattaaactggcttcgggcgactacaccgtgcgttttaaaacagagcagaaaaaaagagaaaaataa

SEQ ID NO: 2038 - DNA, 1572 bp, unclassified Clostridiales
atgaataaaaccctgcgcatctctttttccttaaaaaacacatataaggtaaacggcattctttattctttgaaacaaatacctttattaaagcgccttttgcccgaaagcctgtacagcgtccgcggcctgaagatttttgctaacgtcctttggatattatgggaggttgcatcggcgtttttaggcaaattcatatattttatatctatggttgcggggctggcggctttctatgagacggggcaggacagccggatatttcttaatatcctgctttttttgacggttgcaggcgcgttaatgaacacctacttatttaatcctacgcgggataaatattatgccgtgattcttatgagaatggacgcgcgtgaatatacgctggtgaattatatttatgcgatgctccggctggttataggctttatgccttttacggttatcttcggcctggaaaatagtcttcctgtttggctctgcctgctccttcctttttcagtggccgggctgaagatgactgccgctgctttgtccttatgggattatgagcgcagcggccgcccatacaacgaaaataaactgggcggttatgtatggctgttaatcggggccctgcttgcctgcgcctacgggctgcctgccgttggccttgcgttgcctgtgcctgtttcggctgcggttttactggcgtttattccgttgggcgggatagctgcaaggaagatcttttcttttaaatattaccgggaagtcaatcagcagcttttggcccagctttttaaccagatggatacatcttcgacccagattgccagggcgcagagccgcaaggctataagcgcggataccggcattaccagcaagcggagcggctttgaatatcttaacgaattatttattaaaaggcaccgcaagattctctggagctcggttaaaaagatttcagccgtttgtctgattctcattttaggcgttctgttggtattttatctggcgccccagagtctgcccgaaataaatgagcttttggggaattctctgccttattttgtgtttataatgtatgcaatcaacaggggcacgggctttacccaggcgctgttcatgaactgcgacagcagcctgcttacctattccttttttaaaaagcccgatatggtgttaaagcttttcaggatacgcttaagggaaataattaaaatcaatttgctgcctgccttaattataggcgcggggctggatattattctgtttgcttcgggcggcggagagcttttgcagtatgcagtgctgtttatatccataatatgcatgagcatattcttttcggtccactatctgaccctttattatctgcttcagccgtacagcgccggaaccgaaatgaagggcggcacatataagcttatcatgtcggccacatatctggtctgcttctttttaatgcagctcagaatgcccatactgatattcggcgggttatgcataattttctgcattgcatattctgctgttgcctgcttgttaatatataagcttgcgccccgcactttcagattgagagcttaa

SEQ ID NO: 2039 - DNA, 2418 bp, unclassified Clostridiales
gtgaaaactgaaaaatataatgttaccggcatgacttgtgcggcctgccaggcaaatgtgacacgctgcgttcaaaaactggacggcgtagaggatgtaaacgtgagtctgctggcaaatcagatgaccgtatcatatgacgagaataagctcaggcctgaaaatataataagcgctgtggagggagccggctatggggcgtccagcatggaaaaagcccttgaaaaagataccggcttcaggggagaatggcagttaagaaaaaagcaggctgaggacagccggcagagtatgaaaaaacggctgatttattcggttgttctgctggtgccccttatgtatatagcaatgggttcaatgctgggcctgcctgtccccggcttttttacaggcactcagaatgcgcttgtttctgcgctggctcagctgcttttaactgtgcctataatttttataaacaggcatttttatcaaagtggatttaaatctctgttccatggcgcgcccaatatggattccttggttgccataggctcaggggcggctctggtatatgggctttttgcaatgttccgcatggcctacggctttggccatggggacatggagcttgtgcatgaatacgcccatgcgctgtactttgaatcggcggccatgattctgacgctggtaacggtgggcaaatatcttgaagccagaagcaaggctaagacttcggatgctctggataagcttatggatttggcgccgaaaacggcggttgtattgagaaacggggaagaagtaactatacctgccgagcaggtggccgctggcgatattgttgtaatccgtccgggcgagggcataccggttgatggtgttgtacttgaggggcacggctatgttgaccaggccgccataacgggcgaaagcattccggtagaaaaaaatcccggcgatacagttatatcggctactattaataaaaacggttcctttcagtttcaggcctctaaagtaggggaagacaccactctttcgcagattatccgccttgtggatgaggcgagcaattccaaagcgcctattgcgcgtctggctgataaggtaagcggtatttttgtgccggtagttataggcatagctattgtaaccgctgttgtatggatggctgttggcgaaggatttgagtttgccctttccaatgccatatcggtgctggttatttcctgtccctgcgcactggggctggctactcccgttgctataatggtaggcacgggtaaagctgccgaaatgggcattcttattaaatcggccgagagcctggaaaaccttcataacgtagatacgatagttttggataaaacgggtaccataacctcaggcaagccggccgttaccgatatagtgccgctgacggcggagttaagcggggaagaattgcttatccttgcagcctctgccgagatgggcagcgaacatcctctggcgcaggcgatagtagatagggccaaagctgaaaagctgcctttgatccaggctgaaagctttgaggcggagtcgggccggggaataagggctaaagtagacggcaaagatattttagcgggcaacgccgtttttatggaggaaaaccgactgcttgacggcgctgacgcgggaacggcttctgagcgtgcgcgcgctcttgcgcaggaaggcaagacccctttgatatttgcgcaggatgggaaattaataggtataatagccgtagcagatactatacgcgaatccagcagagcggccataaaaaggtttgcccaaatggggctgaaggtggttatgttgacaggggacaataaagtgactgctgaagctatcaggaaggagctcaatatcaacgaggctataaccgatgtgctgcctactcagaaggaggcccatatccgcgcgcttcaggagcagggacataaagtggctatggtgggagacggcattaatgatgctcccgctcttacacgcagcgatgtgggcatagctataggcgcaggaacggatattgccattgaatcggccgatgtggttctgatgaaggattcgcttaatgacgtagcggcggccattcagttaagcagagcggttgtgcggaacatccatatgaatttgttctgggccttcttttataatattctgggcattcccctggcggcaggcgtgcttttccccgtatttggatggcggcttagccccatgataggatcggcggcaatgagcctaagctctgtatgtgttgtaaccaacgctctaaggctgcgcttctttaaagataaggataaaattccggataatgaggaaaatgacggtacaatagaaaaacaggaggcaattaccgctgatgaagcggaagagaaaggagaaatattgatgacaaagataataaaggtagaaggc

SEQ ID NO: 2040 - DNA, 3447 bp, unclassified Clostridiales
atgcagtggacaaaaatgcagaaaagggcgattgaagcaagggacagcagccttttggtgagcgcagcggcgggaagcggcaaaacaaccgttatggttgaacgcatcctgtctttagcgctggagggagtgcccttggacaggatgctcattgttacttttacgagggcggcggcctcttccatgagggaaaagctgacaagagagctggaaaggcgcatgcaggcccagccgcagaacgccatgcttcgccggcagagcgaggcgctgcgcagagcggatatctccacctattcctcttttctggcaaacgtattgaggcagtattactatctcctggacataccccctgattttaaaatacttgaccaggccagactggcacggcttcaggacgaggcgctggaaaaggtattggagcaggcggaggacataccctttcttgaggatttgtaccgccttctggttaagggggggaaggataagagcctgtgcgacgctatattattaatatatgggcatataagcatatttccgtatccgcagaagcggctggaggagatgctaaaagattattcgtcaggaggggaaatctggattaacgccgaaaggcggcgtatgcaggatgaattaatctgcctcagggaggacgctgatgctttaaagcctctggcggcccaggtaggcggcaagaacaactgcgaacaggtagccgaatatgacgcgcagctcatagaggcgctgctggcggcggagaattttgaagagatggcggcgcttaaaccctcgccctatatgagcttaaggataaaggacggcttttcaggggtctttcgtccccggcacgaggttataaaaagcgctgtccaggggataatggctcaggctggcgaatacgcccaattattaaagtatgatgatttgccttatctgcgcggctgcatggaggcgctctttgaattggtcaggcgcttttcggatactcttttccagcttaagctggaagaagggagcttttatttttcagatatagactgcctttcggccagattgctggataatgagcaggcggcttatgaactgaaaaacagatatgattatatatttgtagacgaatatcaggacaataataaattgcaggagcatattctgtcgcggctctccagagggaacaatattttttatgttggagacgtcaagcagagcatataccgcttccggaacgcggacccttccatctttataaagagagagcgggcttttggcgcgggcggaggcgagaatatatatcttaacaacaatttccgctcgtgcggcggcatattggattttgtcaattttatttttgaaagaattatgaagagggagacattggggctggaatatgatgtaaacgcctccctgcgccctctggcgggttcctggcagtcccttctgggcacggaggaatgcgcctgttctcttgaaaaatgccttaagcctgccgttccggccgaagttatgctcctggattatgacgagcaggatatgcctgaggaatttgagcaatataagaagcagaagctggaggcgctggccgtagccaggcggattaaggaaattatgaacgagcctatatacgacccggccatgaaatgctgccgcatgccccagcttagggatatagtaattttggccaggagcgccaacgaattggcaggcgcgtatcaggaggtattcaaaagcgagggaattcccctttatacagagcctcaggcgggccttttaagcagccacgaggcgggtattattacaagcctgctttccttgatagcgggcggcggagaggacgaagcgcttctggccgtgctcttgagccctatcgggggctttaatgaaaatgagcttgcgctggtgcgctcgtatgtaaaagacggaagcttttcccaggccgcagagcaatttatggatatgacggagagcggcgggatcgggcaaaggctgcatgagttttttgcaaaaatagaaagctggaattttttaagctatgtgttgccccttgaacagcttatatggcggatatatgaggagacgggctattattactatgtttcggcgcttcctatgggacaggtgcgcgctgagaacctgcggcagcttgcgcgcagagcgggtgaatatatgctcttgagcggcgaatctctttcgggttttttgagttatctggaatttgggcgcaagctgggcggggatatagaagagggagccacgctgggggaaaaggacgacgttgtgcgtttaatgaccatacataagagcaaggggctggaatttcccatatgcctgctggtgagctgcggtcaggcctttaataaaaacgaagcgcggcagaatatacagctggattccgagctgggcataggggtaaaattgaggcggctggataaggaaacgggggtttttgaggtgcgccagagcatggcgcgcgcagccattgcggccaaaaaggcggaggagggagttgcggaggaagcgcgcctgctttatgtgggcatgaccagggccataagccggctgatagtctgcggtacaataactcctaagagcgagtttaccggcgggaaatattccatagcgcatgccaacagttttttggaatttatcatgccggcgctgcttaggcaccctgatgcggaaatactgagggagcgatttgaaggttttagccgggagcctggcggaggacggattaaaataagcataagggacgcgcattccctgagagaagaaaaagaagagcctgtttcagaggtgttgcagaacgcgcttaaagagggtaagcgggatataagctatcttgaagagcgtttttcccgcaggtatgcgcttgaagcggccacacgcctaaggagcaagagagcggttactgaactattcggcgacagggaggttccgctgcgccggccctcgtttatgcgtgagctttcgggcgctcaaatgggcaatttatatcataccgctatggaaaggctggatataagggaagatgtgtctgttcacggcatttctgcccagctggacggcatggtggataaggggatttttactcccgaagaaagggccttagtaaagccggaaaagctggcggcgttttttgagggcgaaatagggaagcggctgttaagcgcaaataaggtttaccgggaggaacctttctgcatatgggttgagcaggagggagagcgcgtgctggtgcagggagtaatagactgttattttatagaggatggacacgccgtgcttatagactataaaacggacagcgccgccgctgattcggaaaagacggctcaaaggcaccggccccagcttgagatgtatgcgcttgcgataaaggaaataacagggttgaacgctgaaggatggctttatatgttttcggatatttcctttcataaactggtataa

SEQ ID NO: 2041 - DNA, 1767 bp, unclassified Clostridiales
atggaaggttcaaaaggaggattaaatatgataaaacgcatacaaagaatgtttgccctatccgagcagggcgccagagatatgataaaggcctgcatttcgtgcgtgctgtccaacattgtgttaatgctgcctgttagcctgctttactggctggtaagcgacttctatacgacaggccatagccggggctgggtgttttatgccgttggctgcgttatatgcgtaggactgatagccgtcacctattactggcaatataacgcgacttattttgccacctacaaagaaagcggagtgcgccgcattacgctggccgaaaaactgcgcaagctgccgctgtcattctttggaaaaaaagatttagccgatttaaccagcacaattatggcggactgcgcctttttggaacaatgcttttctcactttgtgcctgaattgatcggagcaatcatatctactgttttggtagcggccgggctgtttattttcgactggcgcatggccttagcggcgttgtgggtactgcccgtttcctttggtatagtgggcttttctgcaaaagttcagaaaaagctcaatgacaagcaaatggcggccaagatgcagtgcgcagacggcatacaggaatgcctggagagtgtaaaagacttaaaagccaataatgccgaaaatgaatatttaaaaggactggataaaaaaattaagcttgtggaaaaacgggcggtaatatccgaatttggcactgcggcttttgtagtatcagcggcattgatactcaagctgggaatagcaacagtagcgctcgtcggttctgcgctgcttataagcggcgatattggtatacttaccttttttatgtttcttttggttgtatcccggctatatgatccgctgcaatctgctttgcagaatttggccgcagttataagcaccagaaccaatattgcgcgcatgaatgaaattttagaccacccggtacagagaggttcatctctgctcactaataagggctacgatatagtatttgataacgtcagctttgcctataatcagggagaaaccgtattgaaaaacgtatcctttacagccaaacagggagaagtaacggcgctggtaggaccgtccggcgggggcaaaactaccgcatcccggcttgcggcccgtttctgggacgctgacagcggcaaaataaccgtgggaggcatggacgtcagcaagattgaccccgaagcactgctttccctatattccattgtattccaggatgtaaccctattcaataatacggttatggagaatatacgcattgggcgcaaagatgcaactgacgaagaagtaattgcggcggcacggctggctaactgcgagcaatttgtccgcaatctgcctgacggctggaacagccagataggagaaaacggctgcgccctatctggaggcgaaaggcagagaatctccatagcgcgcgcttttttgaaaaacgcgcccattatactgcttgacgaagcaactgcctcattagacgtagaaaacgaaaccattatccagaccgccctatccagactgataaaaaacaagactgtgcttataatagcacacaggatgaggacggttgcaggcgccgacaagatagtggttcttgcggaacaggctgttgctgagcagggatcaccccaggaactgcttgcagccaatggtatttacagcagaatggttaaattgcagtctgaaagccagcaatggtctgtaaaagaaatggtataa

SEQ ID NO: 2042 - DNA, 3396 bp, unclassified Clostridiales
ttggcgtcctacagcggaaactgctttttaggcatagacgcgggcagtactactaccaagctcgcgctgataggcgaacagggacagctgcttttctcctattataccaataattctgaaggccccgtaaaggccgccgtaaatgcaatggatatgctcagagagcagctccctgagggagcgcgcatttgccgcagctgttccaccggctacggcgaatccctgctcaaaagcgcgttcagcctagacgagggcgaggtagagactattgcgcactgtactgccgccgcgttttttgagccggaggtggactgcgtgctggatataggcggccaggatatgaaatgcatacgcctgcataacggttctgtggacaatgtgcttctgaatgaggcgtgttcttcaggctgcggttctttcttagagagctttgccaattctctgggctataccgcctcggattttgcccagaaggcagtctttgccaagcatcccgtggatttgggaacccgctgcacggtgtttatgaattccaacgtcaagcaggcccagaaggagggcgcttcggtaagcgatatttcggccggactggcctattcggttataaagaatgcgctgtataaagtaataaagctgactgacgcaaaggatctgggcaagcatatagtggttcagggaggtacgttctataaccgcgccgtattgcgcgcatttgaaaaagtttcgggcggcgaagcggtgtgcccggacatttcgggtataatgggcgctttcggcgccgcgcttatagcgcgggacagatataaaggccaaaagagcactatgctgcccatggaggagatttcacgccttacctttaccacttccacactgcgctgcggcaaatgccccaataactgcatgctgactgtcagccgcttttcaaacggcagccggcatattacgggcaaccgctgtgaaaaaggagccgggggaatctcaaaaataaaagcggctcccaatatgtttgaatataagagcagaaggatgtttgactatcagccattggagccggccagcgcccctaggggagtgctgggcattccccgtgtgctgaatatatatgaaaattatcctttttgggcggtattctttaaacagctgggcttcagcctgctgctctcgcccttttccgaccgcaagctctatgagctgggcatggattccattccctccgaatcagaatgctatccggccaaattggcgcacgggcatgtccagtggctggttaatcagggagtaaaggctattttccatccctgcgtcttttatgagcataaggagcgcgctgacgcccagaatcattttaactgccccatagtcgtgtcctatccggaaaatcttaagaataacgtggaggctatagcggacggaggagttaaatatatacggccctttatagcgtttacagatttaaagaccgcatctgaaagattagagaggctctgccgggaggaatggggcatacctgaaaaggaaacgcggcttgccgcggccatggcctgggatgagcagatgcgcgcaaaagaggatgtgcgccgggaaggggcgcgcctgctggcacttatggaaaaggaaggcgggcgcggcattgtgctggccggccggccgtatcatgtagatccggaaatcaatcacggcatacctgaattgatagcttcctatggcctgactgtatttaccgaagacagcctgcccgtggataattgcgaaaaacgccagctgagagtggttgaccaatgggtctttcattcgcgcatgtattcggcggcccaatttgtcagccggcgggacgatttggagctgattcagcttaattccttcggctgcggcctggatgctgttacaaccgaccagatgtctgaaattatggagaacagcaacaagctttataccgtgcttaagattgacgaggtaaacaatctgggcgctgccaggatacgcatccgcagccttatcgcggctatgaacatgcgccgggacaagggcataaaggcggattataagcccatgcagtaccagcgcgcgcagtttaccgataaaatgcgcgaggaaaggtacactatccttgcgccccagatgagccccatacatttcgacatactggagccgatatttgaaaagcacggctataatataaaaattctggataacgataaccgcactgctatagataccggcctcaaatacgtcaacaacgatgcctgcttcccttccataacagttgtaggccagattatggaggccattctttcgggcaggtatgataataataaactagcggttattatgacgcagacgggaggctgctgccgggccagcaattatgtaggctttataaggcgtgctttggataaggccgggctttcgcatatccctgtaatttcccttaacgccacaggtatggaaaaaaatccgggctttaaattaagcgctccgctgctgctcgcaaccatgagaggcattgtctgcggcgatttaattatgaagtgcctttatcgaacccgtccgtacgagcttatatccggttcagctgaaaagctgcacgaaaaatggcgggatataagcataaaaacgctgacaggcggagacagcggctataattataaggagctttgcgcagcgctggtaaaggattttgactccctgcccctgaatgaaagccttaagaagccgcgcgtgggtatagtgggggagattctggttaaatatatgcctctggccaacaatcacctggtagaattgctggaaaaagaaggagccgaggcggttgtacccgatttgatggattttatgaattactgcctgtataacacgctgtataagcgggaatatttaggcgcttcctgggcctcggccgctgcgtcaaaagcggggctgaagataatagaaacggtgcgccggcccgccgttgaagctttaaagaacagccgccgctttgagcccagcatgcccatagatgaaatagggcagctggccgcgcctcttttgtctctgggcaatcagtacggcgagggatggttccttgccggtgaaatggttgaactgctgaaaacgggcgtgcctaatatagtctgcattcagccttttgcctgtctgcctaatcatgttgtgggtaagggggttataaagcagcttaaaaagagttatcctcaggccaacatcgctgctgtggattatgatccgggtgcgagcgaggttaaccagctgaaccgtataaagcttatgctgtctgcggctaaaagcgcgcttgaggaggataaaagcaagtcagagactgccggggaggagcatttaattaaagaaaatgaaatttctgcggggcttgctcttgccgatgaaaaggcctgcagttag

SEQ ID NO: 2043 - DNA, 2481 bp, unclassified Clostridiales
atgcagaaacgtatgccgcagcaattaaaaatcttccttattaagcttgtagtcctactggtgattgcggctattgtcgccacgatgattgttataagcacaagggttaccggccaaacttcaacgtacgctttccccgatgtatcgggactgccggcatttgaatttggcgacaaggtgtttaacagattgtcggaggtagatgataacggcgaggaaatctataaggaatataagctggtagaggaaaacgataattatgaactgtatttcagtgacagcgaccttgatatagctttggtgcacaaggcttcgggcgaagtgtggttctctaatcccagcgagcagaccattcaggcaagcacaggtatgtccgcgcgcatgaggagtcagcttattatccgtactgtggataaaaccagcgaatccatcagcactaagaacagttataccgacagcttggcctatcaaaaggacagggatgaaaataacctggatgcgggcaaagatgttcttaagcaatattatattaccaccaatcccgaaggcgggctgagggtagtatacataatcggacaggtgcccctgccgtataatttcccggtgcttattcctgaggcgcggtacagcgaactgctcgccacgatagaggctaacggcggattgacggcaagaatgcttaccgaggccaattataagctggttaattcgacaatctgggcggatacaacctcaactaccataactaacgaccagaaagataatataaaatccaatgcgcccaatatagaggatttgctcgcagagggcggaagctattatgtgctgcattcggtttccatctggcagaacaggctgctgctgagcaatatggaaagttattttgccgagtcgggtatcacggctgaggaaatagacgagtacaacgatagtgccggatttgtttcggacaacagcaatcttttcctggtccccatggattattatctggaggctgacggccttaaagtaagcgtgccgtcagaggaaattgaatatgacgattcccgctatgatataaccagcatcacgcttatggagtatttcggaagcgctgacagcaccgaagagggatatatagtggttccggatggttcgggagcgttaatcaatttcaataacggcaaggttcagctttcttctgaaatgtccattcccctttacggagaggacagaggcaagggcaacagctatgacaaagcgcctgccattacagagcagggatatcttcccgtatggggaattaagaaggaaaccagctcgcttttctgcattatagaaggcgctgaggccgtagccaccgtcaaagcggacgtaaaccgcggctcgcgcagccccagcaataaggcctgggctgaattccagtatgtgggcagcgatgacgtaagctttttaggcttggatcagaccctgacagcttatcaggaagaacccataaaagagaagatcgaagtaaaatacagcattttgcctgcttctgaaggaaatgaatacagcgatatggccagatattacagagaatatcttatagccagggatgacctcagagagcagaccgctaaggaaaatatccccttcaacgttgaactggaaggggctatagactcatatgagaccgcctttggcgtagggtactggtacgttaatccgctgacctcctacagtcaggctcaggagatactatccttgcttactgacggcggcgtggaaaatatttcagtccgctacaggggctgggccaatcaggggctttataaccgttactggaaccgcatcaggcttttgtctgagatgggttcaagagatgagcttaaccagcttataagctatgcagcagataacaatatagatattttctatgacgtcgagttaataacagtcggtacggcgaatctgctggacgggttctttacctatacagacgtttccagggaaatatccaggagcaacgctttttataagcagtttgatcttatgaacagcagcaactggagtggctcttatatagttaaaccctctaaagtttcttcggctgcgcagaccttgatagaagatttcaaggatatggggcttaattccatctgcttaggcaggatgggcgaggtgcttacaggcgattataacacaaatgaactgaacgataggaacgaggttcaggatatatatgccgatgttaataagctttttgaggatgccggctttaaaatagccaatgtaggcgcaaacagctatatgctcggcggtaccagcgtgctctttgaactgcccaataccagcagcacgcattatatggctgacgagtccattcccttctatcagatggtagtgcatggccttataagctattcgggcgaagctataaatcagagcggcgatccccagcgttctctgcttaatgcggttgaatacggcgcgggcctgttctaccgctggatgtatgcc

SEQ ID NO: 2044 - DNA, 1470 bp, unclassified Clostridiales
atgcagaaacgagaatatcttgttcaattagaaatcaagggagcagaggctatagtgcaggagcgggtggtatttatccagaacgacgccgcttcgggcagactgcgcctgcttataaccctcaacagcgagccttatcctttagaggggctttcgggcgaaatagcgtttttgaggccggacggccaggtaattatagggggactgacctttgacgagagcggagcatattacgatgtgcagagcagcgaattatactgcgcgggcacagtaaacatttcggtcaatctctatgacagcaccagccggctgacctgcgcccgcttccccatgtatgttgaacaggagctggataccactgatgcggtagacgcgtccctggcttaccctaccatacttgagctgctcaactcagtagacgatttggaagaacgcaccgatgatttggaggaccgcacagttgttttggaagaacagctgacagccggagagcttacaggggacagcgcgtatgaagtcgccgtcaaaaacggctttgaaggcactgaaactcaatggctggcctctctcaagggtgcagacggggcagatggagcggacggcgaagacggggcagacggcgaaaacggaaaaagcccatatataaacgacagcggccagtgggtcatatataacgatgataccggtcaatatgagaatacgcaggtgtcggccgcggacagcatgacggcctctgacatccccacgcagagcggcctgaacgtacagagcgagctggatatactgtactctttacttcccggttctgatatggaggtagacggttattttcaggctgaaaacgctgcggcagcgctgctgcctggaaatgaagaaacttttataacggtatacggccagaatttattgtatcctgaagactcttatgtggccggagtacccagcttagtctccaacatcattgacccaagccaggccgcacagataaattcgctgaccccaatacttatcagctttacgcctaacgttatagggcaggggattacatttactttccccggtcttcctacaggcatatactatgtatcctttgtctcctccaccgacatttcggtttccatgtatgtaaaaaagactgacggtacattgcagcttttaagcaacaatttgggcagcccctcccagactgttaccattaacggcacggtggacgccgcaacggcggtggagctttatgttgcttttgctgtaggcagcaatacgtccataggatcgcccaccaacatcacaatgttccagctttcccaaagctccgcctcccttccctctcctcagcgcagcatcttaatagatacccgcgcttcctcccaaaacaaaacctctctgggcctctggccgtcctggggcgtttggggcagggccacacagcaggcgcagctccgtcttatttcccctataccgtctgcttaa

SEQ ID NO: 2045 - DNA, 2130 bp, unclassified Clostridiales
atgaaaaataaatttattaacttccggctgctttacgaattttttaaacagattagagtactggggataattatcacagtggtgctgtgcggcggcagcgcattctgggattttgttttatacagttctaaattggacgatggatatatagcaaacatttcagatgtggctcccatattgtattatgctgtatatttaattccgatagtttttacttttaaagcattcagctttttatataagagaaaagcctgtgatttttatcacagcatacctgaccgcagaagcagtgtttttgtatctgccgctttggcggccatttgctggagccttataagcattatcgctgtaacgctggcaggttatttgagccttattatcatcggctctgtatgcccgttttcctatgcattatatttcatagcatataatgcggttattgctcttttaataactggctgtgcttctattgcgttaagcataacaggcactcttctttcggggctgatattaaccgttataataatgtttttgcccagaataataatatttttatccaacaatatcgtgagacatatctctaaaatcgcctatatgccgatggacggatttctctttgatccagattataattttttgacggctcctcttgttaatattatttcttcgcaagcaacaagcatcttgcttcccgcttttggcggaggatatatatactctattaccctaagcattatttatttaattctgggctgctttttattctgccggcggaaaagcgagacagcggacaacggcgtgttcagtccgctcaaaaagcatgcctattctctaattgtgtcctttcccatgctgataatagctatgtatctgttgctggagtatatatataataaaggagattatgttaatcctattatcattgtactggccgcagtttctgtggcggtttatttcatatatgtcggcttaacctccagaagcgctaaagcaacgctcaaatccgcgcctatatatcttataaatattggagtatgtgctttaatagggctttgctctgtaggcataggatatcttgccattgatgataacccttctcctgaccaggtcagttatctaaaggtgggtccctattattttgattatgatacgccggaatatgaggatgcagtatgggttggtccccggtacagtaatgaggaaatgatagaaattgcctgtgagcagctggcggaaaccagccgggagattaaggttcaggatgattatatgctttatccggcttactctaaggaagtgacctttgctcttaaatcggggcgcagaataacgcgcagggtatttttctggcaggacgcaatgcgctttgaggagctgcttaatgaagaagaagagcggcaggcagacagtgtctacacactgccgaaggactcggagattgttaatatgtcgggccgggagggaatagcggatatagacggcgcaagcctcagcgcgctttgggaaagctataaaaaggaatatgctgaattgcctgcttcaattcgggaaattctcatggctaaaggtatattgttaaatactgcgagtactcccttctcgtttgatgtaagcggcaatgccggcatgctggcatatagcgatacattttatattacgccggctatgcccgaaacctttgatatggccagcagactggcttttagcgaagaaagatatgctgatttcaaggaaggcttgcagagaatcatccgcgcgtataacacaaatacatcgaccagctatcttgagattgatattagcttctataatgttcctgatgaggtgattgaaggggtatccttggataccatgctttatcaatacagctatacacttaatatagaacgcggtaaagaagatattataaggctgatgaatagttgtgagtttgaaaaagcggaaccggataaagaaataatgcttatcgagctgcaagttggtttcgatacgctgaattctgaccaatctatcagccgcgaatcttatactcattatatttccgtgaaggcggatgatgaattatatcctaaacttaaagaaatgttggttgataaatatatgctggacagggagcagcggctcagttaa

SEQ ID NO: 2046 - DNA, 1554 bp, unclassified Clostridiales
atggaggattgcgcagcagttcgggaaaacagcggcttttcccttcaaacggtgcgtgccagcgttatgaagctgctcaggaacagggcctatattctgttcctgattcttatagggatagcggcatttggctttacggtcactcattttgccatgggcatagatgatttcggcatagggcattatatggatttaagcccggacagcagcaataatatgcttcagcagggccgtctgctgcatatagtgctgtattacctcaccggccttatggacgttattcccttcttaaataattttataagcgcggttctaattgtgttttccgcgctgctgctcagcgctttggccgacgcagcctcaaacgggcgctttaacacctttgagcatatcattttttcgggcatatatatttccagccccttaatggcgtttaagtttatatatgatttggacgtggtggccgtagcaatttcaagtgcatgctgcgtcctggcggtcatttcgggcttttccttcctgcagagccgcagaaagggagaactgttttttgctctgggcatgctccttttgacaataagcagctatgaaacttttaacgccgtatttgttataatggtgctttttgcgctgctgctgatggctctttttactgataagaagcctaaagaactttgcctggcgggcttaaagctcgcgcttatgctggttgcagcgctggttatatattatctggtggtaactgtgctgcaggtgtgcaccaataacttaaaccacacccgcttgagtttattcaaccggggccggccggttattgacttattaaaatccattgcttacaggctgcttaatttcaagctgttcggcatggctgaatttgccgcggccgctgttgtggcggtacccactgcgctgtattacagtattaagaaaaagagcgtctttgtattcctgctctttgccggcatgggcgcattttgtctggcgatgcctgtcatccaggggcagctttattatagaacctgccagacctttgggctgtttatagctgtaattgttttaatggttgtcgagctattcaggaataagcgggtgctgcgcgcgttctgcgcgtgcgccgcggtgcttctgctcatatggcagcttaaggacgtaaatctctggtattacaaggactgggccaactatcagaaaaacgtctatgctatacacaatattgccactcagctcaattcaggctattccatagatgaaaagcccgtctgctttgtgaacagggattatgattcctttttaatgtcctgggacgaggacaaggaccagtatgaaataggagagtcgcccattgtttcggccgtggccttctgcggcgatataacctgtcctgagcttatcaagctgtttgagtatcaggaatataccttccttatacagccgagctgggagcaggcccagaaagctattgaatattcagagaatatgcccggctatccgcgggagggctatatagaggaattagaggatataattatagtaaaaatgggagatgcttga

SEQ ID NO: 2047 - DNA, 951 bp, unclassified Clostridiales
ttgaaagagaagagagcggaaaagcggaaaaaggtgtatgtcaaaagctacgggcggctgagtatttttctgctgcttctgctcgtgctggctgttgtgctgttagtcaacagcagtatatttgaaatttcctccattaacgttatgggcaattcccgcttttctgttcaggagataatagaaagctcaggcgttgctgtaggagataatatattcaagctgtcagaagcggatataaaggagcgcctggagaataatccatatatctcggtgatagatatagtgcgcgaatttcctgataaaattaccatttatataagcgaaagggaagcggctgttcagtttgaatatgcaggagtttactgcaatgccgattatgacggggttgtgctggcggcaacccaaacgcacgaccccgcccttatgcttgtaaaaggcctgaaccttaccggatataagctgggagaacggatagcggtacaggatgagactttgttttcggattatcttgagcttataaagcagcttaaaggctattcgctgatagaccaggtgagccaggcggatttttcggataatatggatataaagcttactatggataacgggcttacggtaaaattgggctccatcgttcaattagcggacaagcttgcctattattccccggctgtggacagccttgaaaaaaacggctatgctgacgcaatggggcagattaagggagttttggatttatcagttatggataatttcgccttcatgcctagtcaggaagagaacgcaaatggggacgcaagccagggcgcgggcgaaaataccggtgaggatgcgggcgggaacgcaggtgagagcggaagcggagatgctggcggaaccaccggcgggaatgcagatgaaagcggagatggagatactggcggaactgccggcgggagcaccggaggctga

SEQ ID NO: 2048 - DNA, 792 bp, unclassified Clostridiales
atgatttttgcggagaaaagaatggctagaacgattgcaatatccaatcagaagggcggagtaggcaagactaccaccgccataaatctttcgtgcgcggttgcggccaaatgccgcaggacactgctcatagatttagacccccagggaaatgctacaagcgggctgggcgtagagaaaaagacggacagcccttgcgtctatcatgtgcttacgggacagaaccggccggaggaggtaataataaaatcagctgcggcgcagctggatttgcttccatcggggattgcgctggcgggagcggaagttgaattgctggaaatgacaaggcgcgagcatgtgcttaaaaatgctttggaggatatacttcatctgtatgactacatatttatagattgccctccggctttaggaacactgacattaaacgcgctaacggcggcaaactccgtattggttcccatacaatgcgaattttttgccctggaaggactggggcagcttatgaacaccgtttcattagttaaaaagcatcttaacagggatttatacattgacggtgtggtttgcacaatgtatgacgtcaggactaatttaagcatgcaggtggtggaagaggtaaaaaaatattttgctgacaaggtgtattccacaaccataccaagaaatatacgactggccgaagctcccagctatggacagcccatagagttatatgacccacggtgccagggggcacagagctatcgagaacttgctgaagaacttatacgcagaaacgaggagggatga

SEQ ID NO: 2049 - DNA, 1398 bp, unclassified Clostridiales
gtggaaggcaaggtaagccgtataataggcgccgtggtagatgtggaatttactgatacgacggtgcccaaaatacacgatgcgattaaagtccccatggaggatggacggaccatttggctggagacggccaggctgctgcctgacaatactgtccggtgcatctctcttaacgctaccgagggaatgttccgcggaatgaaagctatagctaccgggcggcccataacggttaacgtaggggaagagactttaggacgcacggtaaatgttacgggggatcccatagataataaagggccgataaaggctaaaaaggccatgcccatacaccggccggcgcctgcttacgcacagcagagctttaagaccgaagtgctggaaacaggcataaaggtaatagatttgctggctccttatgtccggggcggcaagattgggcttttcggcggcgctggcgtagggaaaaccgtgcttatattggaaatgataaggaatattgctacagagcacggcggctattcggtatttaccggcgtgggcgagcgttcgcgcgagggcagcgaccttttagacgagatgacaagttcgggcataattgaaaagacggcgctggcctttggccagatgaatgagccgccgggcgcccgtatgagggttgcttttaccgggcttactatggccgagtatttccgggatgagatgaaaaaggatgtgctcctttttatagacaatatttttagatatattcaggctggttcggaggtttcggcgcttttagggcgtatgccttcggcggttggatatcagcctacccttgcgcaggagatgggggagcttcaggagcggataaccagtacgccggacggctcaataaccagcgttcaggcggtatatgtgccggctgacgaccttaccgaccctgctccggccactaccttttcccatctggacgccacaaccgtgctttcccgttccatagcggagatgggcatatatcccgcggttgacccgctggattccacctcccgcatactggagcccaatatagttgggcaggaacattaccgggtggcgcgcagagtacaggagatactccagagatataaggaacttcaggatattatagttatactgggtatggatgaattaagcgaggaggacaagctgactatattgcgcgcacgcaagatacagaaattcctttcccagccaatgtttgttgcggaaaccttcagcggtattccggggaaatatgtgcctcttgaaaaaaccatagacagctttgctcagatagtggacggcaaagctgacaatattcccgatgctgccttctttatggcaggggatatagatgatgtgcgcgctaaagcagcggcgctggagggcaatcaataa

SEQ ID NO: 2050 - DNA, 1215 bp, unclassified Clostridiales
atgaaatttgtaaaaatcatatttgccctgtgcatatcggcggctatattgattactgccactccggcgctggccgccaatcttatgccgggagacaaaggtgacgacgtaatagcactccagcaggctctctccaacaaaggctattataacggcgagatagacggattattcggaaaccagcttgaagaagccttaataaacttccaaaacgacaactcacttgctcccagcggaattgcggataaccaaaccctggccgctttagagctgtattcaggcgaagaaattgaaaaggacgcagttgtaagcataagcggagaaaaattaaatttacgttcaaaagcaagcaccagctcagatgtgctgacggaattggcttctggtacccgtgtgcaggttttatccactcagggttcctggtgccttgtacggctgatgacaggtattgaaggatatgtttcaagcaaatatatttcagaggacgccctttcggaggacgccgaaatatatacgggcagcatgcccgtttcagcgctttcagagggtgctaccggtcaggatgttattttgctgcaggaccggcttaaggagcttaattatttttccgccaagtccacgggcaattttttaagcataacagtcaaggccgtaaaggattttcaaaaggctaacgggctggaggataacggcatagtggatatcgacactataatagttctcttttcagacagcgccgttaagaaaacggctcagcctgccagcactgttaaagaggagaataagcctcaggaaaccgtgccttctatttcagttgagggaagcaaaacagccgttcagatagtggaatacgcaatgacctttttaggcacgccttaccgcttgggcgctaacggccccaatgcatacgactgctcctcttttactaaaacagtctacggcaaatacggctataccctgcctcgctcggcctattctcagggctacggcaatttgggcgctaaaatcaaatccatatccgctttggaaacgggcgatctggtctgcatgaataccttaaaggacaacgacctctgcgaccatgtcggaatatatatcggagacggaaaaattattcactgcgcttcaggttcggatatgcaggttgtaatatccaacattaacagcagctattataaaaatgtcttttcctggggcataaggataatagattga

SEQ ID NO: 2051 - DNA, 735 bp, Oscillibacter sp. CAG:241
gtgcaggagaggagtagcaagcaggaggaggccctgtttacgctgctgatggaccaggtcgcgcggcaggaaaaccaacaggcccgggaggccatggagcgcctggcccgtgacccgtcggctgcggtgcctgcgctttcgcagcggcggtgcatgcagaccattcagcggggccttctgcgccgggatctgcgctccgccggacgggtgctgcggcggctggcgggccgggcagcggtgattctggcagtggcagcactgtgcttctcggtagcctttgccgtgtccccgaccctgcggtcccagacggttcgctgggtggtggaaaccttcgacacccataccctgctgcgccccgggtcccgggcggaccgcagcggcgggtcctccctcccctccgggctgacggtgggccggctgcctaccggggtgaccctgacggaaacaaacctgagccagtggatctggttttaccgctatgccgacggcgacggctgctggctggagatcaggctgatggctttcagcggcgacggcgtcatgtgcgtggacacggaggacgccggtatgcaccggctgaccatcaacggatatcccgcattcaccacccacaaaaacgggatgtccaccgtcgtgtgcacgctggatgactggagctccgttctgaccgtcaccggcaagggcttctccgtggacgacctggcccaggtggcggagggggttcaggtgcggtaa

SEQ ID NO: 2052 - DNA, 846 bp, Oscillibacter sp. CAG:241
ttgcaaatccgttggggctgcggtatacttgaatcaaaaagccggatacactttcgccggcggaaattcggctgtgccggggcctgctggcgaagggcggcgcaggccggtgacatttttgtcacagacggaagcaaagcggcctggtatactggacccgataaggagggagcacagatgcacagaatactgctggcggaggatgacgacgccattgtccgtctgctgacggattttttgcgggaggagggcttcgccgtgacggcggcggcaggagagcgctccgcccgggaggccctggaacgggagcggtttgacctggctctggtggacttgcagctggcggacggctccggcttcggcgtgtgcgccgccgcccgggcccggcagctgccggtgatctttctgacggcctccagcgacgagagcaccgtagtatccggctttgacatgggggccgacgactatgtggccaagcccttccggccccgggagctggtgtcccggatccgcagcgtcctgcgccggtgcggcagggacaaggcagtggtgaccctgggcgatgtccaggcggacatcgagcggggccaggtgacgaaaaacggggcggacgtatatctgacggccctggaataccggctgctgctggtattcgtcaacaaccggggaaaggtcctgtcccgcagccgcctgctggaggagatctgggacgtggccggggattttgtcaatgacaacaccctgacggtatatatcaagcgtctgcgggagaagatcgagacggaccccgccgcgccgcagatcatccgcaccgtccggggcctgggatatcgggtggagctatga

SEQ ID NO: 2053 - DNA, 819 bp, Oscillibacter sp. CAG:241
atggagtacagcgaaacggaaaagcaaatgctccgggagatcctgccgggcatcgccacgcagctgcggggctctctggccaacatccacgcagctttgggacgccttgccccggagcaggcgcgggacgccagcaccgacaccgaccgcagtgccgccattctgtgccagagctattaccgcatcctgcgggtggtgaacaatctgtccgacgcgcctatgctggcagaggaaaagcctctggatacggaaaatgtggagctggtgcgctttctggacggtctgtgccgccagggggaggccctggcccagctgatggagctgcggctgacctttacctgcccggaacgggcccacaccgtggctgtcaaccgggagtatctggcccggctgttctggaacctggtatccaacgccatgaaattcactccccggggcgggaccgtggacgtgtgcctgcgctccggccagggctgcgtgctgctgtcggtgaaggacagcggctccggcattccgcaggacaaacaggcccagctgtttgaccggtggcagcacagcaatatggacctgccggcccacggcctggggctgggtctgcctctgtgccgccgcattgcccagggccacggcggcagccttgtggtgtcatcccgggaggggcagggcaccacggtgacggtgcgcctgccggaccgccgcagcggcgtgaccctggtgcgggacatgccgttccactatgccggcggcttcaaccccacgctggtggagctggcggacgccctgccgtatcaggcgttcaccaaaaactatattgagtaa

SEQ ID NO: 2054 - DNA, 954 bp, Oscillibacter sp. CAG:241
atggataagctttacgccgcccctatggaggggcttaccgggtatttgtggcggcaggtccacgcggagctgttcggtccggcggacaaatattttacgccgtttctctcccccaacgccacctgtaccttccagaggaaagagctggatgagatcgacccggagcacaaccggggactcaacgtagtgccccagctgctgaccaaccgggcagagcatttcctgtgggctgcccgggagctgcatgaccggggctttcgggaggtgaacttcaacctgggctgtccggcaggtactgtggccgccaagcggaagggggcgggcctgctggcctatccccaggagctggaccggtgcctggaggagatctttgcgggattgccccggggaatgacggtgtccgtcaagacccggatcgggaaaaacgaccccggcgaatggccggggctgttggagatctatcggaggtaccctctggcggagctgatcgttcatcccaggctccagaaggaattttacaagggaacgccccaccgggaggctttttccaccgtctccggcccctggccggtggtgtataacggcgatatatggacggcggaggacgctgcggcgctgtcccgggactttcccgggacagatgcggtaatgctgggccgcggactcatgcgggaccccagcctgctgcggcagctgcggggcggccccgccgcctcggtccgggaagtccggacgtaccatgaccggctgctggacgcctaccggcagcggctctccggcgatctgccggtgatgcaccggatgtgggagctgtggacgtacctggccgccgggttcgatggggcggagccgtatctcaagcggatgcgcaaggcgaagaatttatcggaatatcaggccgcggtggacgcactgctccgggagcagccgctggtatacagcaaggagggatga

SEQ ID NO: 2055 - DNA, 1023 bp, Oscillibacter sp. CAG:241
atgacgtccaaacgcctgggccgccagacggtgcggctggcgcagccccccagcgtggtgtcctacgccaacatcggcggcaagttcgagggaaacggtcccctggcggagcactttgaccagctgtgcccggactcctttttcggaaaggacacctgggagcaggcggagtccgccatgcagcagcgggtgctggagcgggccctggaaaagggcgggctgatgcccaaggatctggattacgtcctggccggggatctgctgaaccagtgcatcggcaccgcctttggcctgcggggcttcgacatcccgttttttggcctgtacggggcctgctccaccatgggggagagtctggccctgggcagcctgctgatctccggcggccacgcccggatgacggcctgcatgaccagctcccatttctgcaccgccgagcggcagtaccgcatgccggtgccctacggcagccagcggacccccacggcccagtggaccgccaccgcctccggctgctgcatcctggcggaccagggggacggcccgtatatcacccacgttacctgcgggaggatcgtggacaagggtatcaccgacgtgaacaacatgggggccgccatggcccccgccgcctgcgacaccctgtccgccctgttccgggagacgaaaaccggccccggggactatgacctgatcgtcaccggcgacctgggggtcctgggccatgccatcgtcacggacctgctgagccgggagggcgtggacctgtcccggaactatcaggactgcggcatgctgctgtacgacctggataagcaggacatgcacgccggggcctccgggtgcggctgctcggcagcggtgctgaacgggtatctgctgggcggtatgcagcagggcaggtggcagcgggtagtgtttgcccccaccggagctctgctgagccctacctcctcctttcagggggagagcattcccggcatctgccacgcggtggtattttccgcccagaaggagggatga

SEQ ID NO: 2056 - DNA, 519 bp, Oscillibacter sp. CAG:241
gtgaactttgcaaagaaggcctttacctttgccgcagtttcctgtaaaataatcgtgtccttttcccggaaggacttcatttttttggcagatcgaggcatttgtatgagtttctttcaaaaaattggcaatgcaatggcccgtttcatgtatggccgcaacggcgtggatcagctgggactcaccagtctatggacggccattgtcctggatgtggtcaacctgttcatcaagaacaaaaccgcctatgccattctttcctccatcgccctggtgataacggcatgggtggtgttccggctgttttccaagaacctgtccaagcgccgggcagagaacgcgctgtacatgagcaaggtggtgtatcccatgcgccgggccctgtcccgcagtcgggataaggagcacaaatatttcacctgccctaactgccacacggtgtgccgggtcccccgcggaaaaggccgcattgtgatcacctgtcccaagtgccacggtgagattcacggcaaaagctga

SEQ ID NO: 2057 - DNA, 306 bp, Oscillibacter sp. CAG:241
gagcctgacaaagcaaatgaaaactccgtatccatttggatgcggagttttcactatgtgtctgcttttttgacaggtgcaggtcagaagtaccagcggaatgcggacaggagaatcaacaggtcaatgcccatcagaatacacggcaggacaggggacgccgttttttcatcatccagccggaccacggacttgataagccaggccagcaaaaacggaaagaccatacaggtgatgatcatcaatgcgtcgttcatgggagactcctttctgtcttatccaattgtgtctgggtcctatttctga

SEQ ID NO: 2058 - DNA, 897 bp, Oscillibacter sp. CAG:241
aagagagaggaggaaacgcgcatgcctgactatatcgctcaataccgcatctatctggagcaggaaaagcacgcctccgccaacacggtcagctcctatatccgggacgtcacacagttttgcgcctggctgccggagggcagcgacctgcgccgggtcaagcctgccgccgtgtccgattacctgacctacctgacggaccggggccgctcggcggccaccgttatccgaagcgctgcgtccatcaaatcgttctacaattacctggtggtttccgacgccatgaaggccaaccctgctaagggcattgccgccgcaaaggcggagcggaagtgccctcagatcctgacgggcagggaagtggagctgctcctggagcagcccaagtgcgtggacgaaaaagggttccgggaccgggccatgctggagctgctgtacgccaccggcatccgggtgtcggagcttattgcgctgaatcgggaggatgtgaatctgcaggcggcgtttctgcgctgcggcggcgaaaaacgagaacggatcatcccgctgtatccccgggcggtgaaggctctgcgtgactatatccagactgtgcgtccccggctggcgggccaggaggagccggcactgttcgtcaacatgaacggccagcgcatgacccgccagggcttctggaaaatcgtgaaatattatcagggaaaggcggagatcaccaaggacatcacgccccacaccctgcgccattcctttgcggtgcatttgctggaaaacggggcggatctgcgctccattcaggaaatgctgggccatgcggacatctcatccacccagatttatgcgcagattgtcaagcagcgtctgcaggatgtctatcacaaggcgcatcctctggcctga

SEQ ID NO: 2059 - DNA, 1446 bp, Oscillibacter sp. CAG:241
aaaaagggggcggcagccccggaaaaggaggaacaacgcatgaaaaagctattgcgcatgatctgcctgaccctggccctgtgtatgctggccgggtgcggcgcaggaggggcgcagcccacgccctccggggcttttcgccagaccggcgaggcggtagagcctgccacggctcaggagctggcggcctgccagctggcggcggcagactatcccgactatccccagcggcccggcatggaggactacactgacagccaagggaacatggacatggacgcatatgacgcggccatgagcgcctatcaggaaatcctggccaagctggggaagctgtccgccaagccggatatcccggcggtgcgggactttgccgccgatacatccctgcggctgctggccggagagacggagaacgccgtgtattcgccggtgagtctgtatctgaccctggccatgctggcggacctgagcggcggcgacacgtcccagcaggtgcggcagctgctgaacctccaggacccggaggccctgcgccagcaggtgcagcagctgtggatggccctgtactgcgacaacggcatcaccacctgccgtctggcggggtcggcatgggtggcccagggcagcaccgtccaccaggcggcgctggacagcctggcaggggtccaccggtgcggcgtgtatcaggcagccatgggaacccaggaggcaaaccgggccattgctgcctggctggaccagcagaccggcggcctgctccagggagataccggctccatccggaccagtcccatggagctgctgcggctgtacagcaccgtgtacttcaaggacggctggctccaggagttcgcaaaggaggatacatatccccagaagttccgcccggcctccggcagcgcggtgacggcggacttcatgcaccgggaggatgatgcggcccgatatctccggggccggggatatcaggcggcgtccctgcccttgcagggaaatctgcagatgatcgtggccctgccggatcagggccgcagcacggcggacctgctgagccgccagggtctgctggaggagctgacaagcatggaggaccggcattgcgtccggtggtccgtgcccaagttcgacgtacacagctccatggacctggcagagctgctgcaggacatgggcgttaccgacgcctttgacaagagcaaggccgacttctctcccctcagtgatgaggcggcggtgctggccggggtcatgcaggccgcccgggtgaaggtggacgaggacggcgtggagggcgccgcctacaccgaggccatcgtggatctgaaatgcgcggaggctcccggcgcaaagccggtggagatgtgcctggaccgtcccttcgtgttcgtggtggccacctccgacggcatccccctgttcgtgggtacggtacagtcggtgtaa

SEQ ID NO: 2060 - DNA, 282 bp, Oscillibacter sp. CAG:241
atgagcgttgtgattttgggaggaaacgagtgtatggagcggcggtataaggagctctgtcagacgtaccggtgccaggccaaggtattcaccaagcctgccgggggcctgcggaacaagctgggcagccccgacctgatgatttttttcaccggcaccatgtcccacaagatggtgcagggggccctcagccagctgaaaggccagaacaccatcatcgagcgctgccacaccagctccctgtccgctctgcggggaattctggagaagcacgcaggatga

SEQ ID NO: 2061 - DNA, 675 bp, Oscillibacter sp. CAG:241
aaacgtcagaaggtgaaaagcgtgtattttgcatacggagaagccgaagcttcctatttgcggcaaaaggataagcggctttgccaggtcattgaccgcatcgggcatatcgaccgcccagtggatacggacttgttttcatccgtcgttcaccacatcatcgggcagcagatctccaccaaggcacaggcgaccatctggcagcggatgcaggatgcactgggcaccgtcaatgccgagaccatcctgacagcaggtgttcccaagctgcagggactgggtatgaccttccgcaaggcagagtatattacggattttgccgaaaaagtccatacgggcgcatttgatctgcatgctgtggagcacatgagcgacgaggatgcgatccgggaattaagcagcctgaagggcatcggcgtctggacggcagagatgattctgcttttttgtatgcagcgcccggatattttcagctatgatgaccttgccatccagcgcgggctgcgcatggtatatcaccatcgcagcattgaccgcaggctgtttgaaaaataccgccgtcgctttcacccctattgcagcgtggcaagtctgtatctctgggctgtggcaggcggcgcaatcccggagatgaaggactacaagccgagtaataaaaacagaggcagcttttga

SEQ ID NO: 2062 - DNA, 288 bp, Oscillibacter sp. CAG:241
atggccggcatcccctatgatccgctggacatggccagcctgcagctctgggcccgggagaaccgggacgacaaccgtctccagatcgagcggctgctgcggaatctgcccatggcggtggagcaggatctgacggaccggcagcgccagatcctccgcatgcgctattctcagagcatgacggtcagcagcatcgcccgggagctgggcatcaacaagtccaccgtctcccggactctgtccaacagcaccatgaagctgtaccgttccctgcggtacagcctgtaa

SEQ ID NO: 2063 - DNA, 453 bp, Oscillibacter sp. CAG:241
gttactgaacacaaggaggtatccgccatgcattcttccacccaacagtttgtccgggccatggacgccaaggacatcaagcactccgacccggagaccgccgccggcggccgggaaaccgtcaccgtgatctacagcggtgagaatattccctccatccgcatgcgctttttcttcgaccaggactgccaggatgtggccatccgggtatttgacctggtgaaggtgcccgaggccaagctggatgttctcctgaaggccatcaacgccgtcaaccggcgcttccgctttgccaagttcgttctggacaccgacgacaacagcgtccaggccgagctggacgccgtattccgcagccacgacgtgggggatatctgcctggagctgatggcccgctgcgtggacatctgcgacaaagcgtatcccgatctgatgaaggccctctgggcctga

SEQ ID NO: 2064 - DNA, 1020 bp, Oscillibacter sp. CAG:241
atgaaaaagaggatttgcgcgctgctgctgtgtctggcggccctgttttccctggcaggctgcgggaccaagccaaagaccccggtgaaggggcagaacgaaccgaacccggtgaaggcgcagggcctgccggaggcggaaccgggctgcgttccgctgctgctgatctacacctgcggcgagcccggcagccaggtgtttcaatactattccgccacctggaacatccagcgcaataccctgacccaggggcagctgttctacaccggcaccagctacggctttgtgcccgacggctggcggcaggagcgagccacctttgacggccagagcttcacctatatccgggaggggcaggagcgccgggagccgctgccggaaaccacggaggaccggggcagtgtccggtgcgctgcggcggacggcgacacggcggtggtggtgtatatgagctatgcaggcgatgacgctccgcttaccgtcagcgtgggccgctatcccctgggacatccggagcaggcggcctgggtgcaggctcagatcagcgacagcgccgaatgctacgtcagcacgatcttcaccggcacgacgctgtataccggcggccaggtgtgtctggcggcaggggagagcatcctgctgatggaccctgcctccggcgaagtgcggcagctggacctgtcgcctatgagcgccccgcttccggacggcgtgtcccacacggaggacagctatctgggggccagcgtcatcggcagctatggcgacgtccttctggtgggcaaggccctgtatcaggagggtgtatgggaccggtaccactatgtgatggccgcttatcaggatgggaagctgatggccatgctggaccagaacagtgccgactctgcccagctgaccctctacggccccgacggaaagaccgccggaagcagcccgctgatgacggaggactatgtggcctccggcggtacggctttgccggtggagtacatcggccagctgttccctctgcaataa

SEQ ID NO: 2065 - DNA, 306 bp, Oscillibacter sp. CAG:241
atggtgctatgcggccttgcggggcggctgctgccgggccgcaagtaccgcagccccctgggtccgctgacgaaagaacgccaggaatttgccgaccgtctgctgctgaagctgctgtggcagttcggccttgcctttgcggccctgtcgtttatgatcatgcgttccgtgcggttgatgggaagcagcggccagcagatcctgctgtacattgccattattctgcaaataatcggggcatttgccttgattttgccggtggaacgcaatatgaaggtatattttgacgaacaggaggacgaatga

SEQ ID NO: 2066 - DNA, 516 bp, Oscillibacter sp. CAG:241
cagcgtccagagccattctctgccggattggctgcggtaaagggggatgctgccatgcatgagacggaagcgctgcatatccgcaggctgacggcggaggacctggagcccctgcaccggctgctgtcggatccggcggtgatgcggtatctggagccgcccttcacccgggcgcagacggaggcgttcctgcaaaaggcgggcatgggccgtgagccgctgatccgggcggtggaggacggccgcggctttgcgggatatgtgatctatcacccctacgacgagacgtccatggagctggggtgggttttggcttctgaccggtggggcagggggtacgccctggctctgacccggcagatgatttgccgggcgcgggagaatggccgggacgcggtcatagaatgccatccgcagcaggcggctacccggcatatcgcggaaaagctgggctttcgtccctgcggcatggatggcgggtgctgcgtgtaccggttggccgggaaaaacgaatag

SEQ ID NO: 2067 - DNA, 195 bp, Oscillibacter sp. CAG:241
gcggatcgaacaaaagaagcggaggacatggtaacgacatatcacataaccgcatcttctagcagggataaaaaagatgaaaaaagagggaaaaaggtgttgacaaaaggggaaaggggtggtattctaacaaagctgtcggcgagagcgggcggcagggacacggacgaacgaaaaaagttgaggattcggtaa

SEQ ID NO: 2068 - DNA, 1152 bp, Oscillibacter sp. CAG:241
gtgcagtttttccacctctgtatatacaacccggtcaacgccatgcgtttcatcggcagcggcgttctttttacccccggcttgcaaatcggtccgcattgcggtacaataaacaggaatatatggcggcatggccgcacggaggtatatatgatcgttgtcatccgaaaggatacccaggagcccgccatgcggcagctggcagtgcgcctgatgaatcagggggtgcgcataggccgcaccccgggccaggacgccgatgtgctgacgttggtgggagatacctggcggctggacccggaggggctgctggcccttccctatgtgctggatgtgcggcgcattacgccgccctaccggctggcgggacgggctgcccatccggaaaacactgtggtggaggtgggcagtgcgcggatcggtgcggagttctgcctcatcgcagggccctgcgctgtggagtcccaggtgcagatggccggcgtggcccggcgggtgaaggccgccggggcccagctgctgcgaggaggcgtattcaagccccggacatccccctactccttccaggggctgggtcaggcgggcatccccctgctggtggacgccggtcaggaggcgggcctgcctgtggtgacggagatcaccgacccccggcagctggacgacctggcagacgtggacgtcctgcaggtgggcgcccggaatatgcagaattttcccctgctccaggccctgggccaggtgcggaagccggtgctgctgaagcggggcatgtccgccaccgtgacggagcttttgcaggcggcggagtacattctggccgggggcaattcccaggtcattctgtgtgagcggggcatccggacctttgagacggacagccgggccaccctggatatcgcagccattccggtgctgaaaagactgtcgcacctgcctgtgatcgtggacccaagccacgccgccggacgggcggagctggtggcccccctggccctggccgccgcagccgccggagccgacgggctgatggtggaggtccacgaccgtccggcctgcgccctgtccgacggggcacaggctctgtcctgcgaccagtttgacgccctggcccggcaggtgcggcagttgctgccccacgcataccgttga

SEQ ID NO: 2069 - DNA, 702 bp, Oscillibacter sp. CAG:241
ggcggctctccccgccggcgttacctgcacacggctggggtgatctatccggaggagcgctttcttcagctctccggtttgcagcacttcaaattctgccgcagacaatgggcgctgatccatatcgaaaatcaatgggcggagaattaccgtaccacagacggtgcgatcctccacgagcgggcccacgataaggacttcaccgagagccgcggcgacctgctcattacgcgggatatgcggatattttccccgaccttaggggtttccggtgcctgtgacgtgctggaattccaccgcagcggcgtggggattccgctgaaagggagggatggcctttggcagccctatccggtggaatacaagcgcggcaagcccaagcaggacaccacggacgccttgcagctttgcggacaggctgtgtgtctggaggaaatgctctgctgccagatcccgaccggcgcgctgtactacggcgagacgcaccgccgtacagaggtggaattcacgccggagctgcggcaggaggtcaggacgcttcttgaggagatgcacgctctgtatgagcgtggctggacaccgaaggtcaagccgacaaaagcctgcagcgcctgctctctcaaggagctttgtctgccgaagctgatgcggaagcaatctgttgcggactatctgcgggatcatctggaggagacgccatga

SEQ ID NO: 2070 - DNA, 246 bp, Oscillibacter sp. CAG:241
gtgcggctgggccgcagcaggaagaaatattccaaaccaaacagtccaaaaaaacatacgccgcacagcaaaaatgccagcagcttcattaaaaaagtgacagacgatttaaatctctttagcataacaaaaatccttttccggttatcctttgacaagtccggttattatagcaggtttgaacgaaaaaatcaaccttttccccgcttttcgggaacacatcagaataaaacccggatgatgtga

SEQ ID NO: 2071 - DNA, 495 bp, Oscillibacter sp. CAG:241
cagaaaggaaaatcgctcatggaaaagcagctcaagggcttcggcctgttcagaagatctcacgaaagcgccgtggattcggcggaggtcaagcagaacgaaaaccgcatcttccaggaggtgtgccagctggtgcgggccttccgggaaaagcatccctccgtggggtatgcggtgcggctggagcgctccgctcccctggagccgggtcccgcaccgtcccgctattccgcctggctcatcgtctctctgagtcggaaccagacgattctggagagcggcccggataccaccgagtggcccgacgcccgggacaagatcacccgggttcggggcaaaaagctgacggtttctgacgcgtatgcccgcctgatcgaggaggacctggagagcattaccgccgactacgaggcaagccccggcacctatgtggaaaaccgggaggcttcccgtgaaatgctggccgaggcctgccgcgtggagtggatcgagtaa

SEQ ID NO: 2072 - DNA, 306 bp, Oscillibacter sp. CAG:241
atggataagcgcgatgcatcatgcgaaagagggtcaattcgatacaggggggatggcattgtgaaatcgacgggtattgtaagaaaggtggacgagctgggccggatcgtgctgccggtggagctgcggcgcaccatggacatcgtggaaaaggacgcgctggagatctatgtggacggcaattccattgtcctgcggaaatatcgtcccagctgtattttctgcgacagcaccaaggatgtgcgtaccttccggggccgcaacgtctgtccccgttgtctgcgggagctccgcgaacgggtgtga

SEQ ID NO: 2073 - DNA, 876 bp, Oscillibacter sp. CAG:241
atgcgggataagaccatggaagatgtgatttttcaatacgacggaagctttcagggctttctgtgctgcgtgttcgacagctatttccataaagaattccccatcgccttttgcagcgatgaggaatgtgtttccctgtatcccgtgcgggtggtgatcacccggcaggaccatagccagcgggtatatgccagtctggagcgtctttccaaaacggcgctgcgggttctgcgccgagcgtggctgacctgcatggaggataaggaattccgtctgtatgccttcatccgtaagctctatgaccagggcccaggatttatgcacagcaaggcggacgacgtgtactatcccattgcctgtgccctgcggcatctaagcggtgagctggaaaagctccgtggcttcgtacggttttcagactacaacggcgttttaggcggcgaaatcgagcccaaaaaccgggtgcttcccctgctggctggccacttttgcagccgcatggccggagagtctttttttctgtatgaccgcacccacggcgagctgctgctgtacgccaagggccagcggcgcattgtcccggtagaccatctgacgctggatctgcccagtcgggaagaacttcaataccgtgccttgtggaaggaatttttcaacactgtgtccatccgggagcgtatcaatcctcgttgccagaacacatttcttcccaagcgctaccgtgggtccatgacagagtttctgccgacggactatgagcaattcggtcgtccagcagcttccgcagatttgccagcccacggcgctccagccgcgatacctgcacctgggatactcccaggatccgggccgtctgctcctgagtcagccccttaa

SEQ ID NO: 2074 - DNA, 900 bp, Oscillibacter sp. CAG:241
atgaagaagctatcccggctggcagtcatgctggcgctggtgctggccctgacggcgtgcagcggcggcgcagatacgccgtcccccgacgagcagacggaggggcagcatccggtgacggatgccgcagagctggagggccagtggacgtccccctcggggaatattctgtccttttcggcagaccagggccgctatacctaccagaccttctccggccgcacggggcagggtccctatgacgccgctgccgatgtgcctaccatcgactttgacggcttcctgtacgattttattctccgggacgacggggtgctgctgcccaatcagaacggcagcggcggcgacgcggagagcatcgaccacttcaccttccgccgcagcagcgacgcccggatagacctgtgggagctctcggacctgagcggcgtgtggcagaacgctctgggtgagaccctggtcatcgacgcagaccgcatggcgtatctgagctacaccagactatccatgggcagcggcaccatcggggacgaccaggacggcaagggaccgtatctggccatgaacggacgcatttacctgtcccccggcctggataaggaccggttcaccctgctgggtcaggatgcggacggcagcttctccggcgtgttctacccctacggccaggcagcggcctataccgccctgccgggggccagctttgagaccgatgaggacggctattgccgctggtacagcgacggtcacgacgccttttacattaccggaagctacaccctggcagaggacgggctggcctatcgcgacgacggcccggtgtatgccgccgggttcgaccccatcccctacgatcccgccgaggactggggcgacagctggatgagcaattggggataa

SEQ ID NO: 2075 - DNA, 1266 bp, Oscillibacter sp. CAG:241
atggaactgctggataagctggccatcctggccgatgcggctaaatatgatgcagcctgcacctccagcggcgttcgccggggctcccgcccgggtatgatcggcaacaccacctcctctgtagcgggttgctgccacagcttttccgccgacgggcgatgtatcaccctgctgaaggttctgatgaccaatcgctgcgtgtacgactgcaaatactgtgtcaatcgccgctctcacgacacacggcgagccgcctttacgccccgggagctggcggaactgaccattgaattttaccggcgcaattatattgaggggctgttcctctcctctggtgtgcttcgcagcccggactacacaaccgaacagatgatcgaatgtctccgactgctgcggcaggaataccggttcaacggatatatccacgccaaagctatccccggcacatcgccggagctggtgcagcagctgggcctcctggcggatcggctcagcgtgaatatcgagctcccctcccaggaggggctgcaaacgctggccccggataagagcaagcaggccattctgcggcccatggcgctgattcgggaccaggctgcccagagtaaggcagagctggtaaagtacaagcacgcttcggtctttgccccggcgggtcagagcacccagctcatcgtgggagccacccgggacacggaccggcacatcctgcacctgacggagtctctgtatcagaagtatcgtctcaaacgcgtgttctactccgcttatgtcccggtagtggagaacaccctgctcccgtctctggataccaaaccgcccctgctgcgggaacaccggctgtatcaagccgactggcttctgcgcttttacggcttcagggcccaggagctgctggatgaagcccatccggacttcaatcccctgctggatcccaagtgtcactgggccctatgccatctggagcggttcccggtggaggttcgcaaggcagagccggaaacgctgctgcgggtgccgggtatcggcccgatcagcgcccgtcgcattgtcaccgcccggcggcacgccgtcctgcggatggaggacttgcccaagctgggcgtagtgctgaaacgcgcacagtttttcatcacctgtggcggccgcatgcgcacggggctgcacttctccgcctctaccctttcccggcagctggaggctatggaacgaggtcagctcccggcagaggaatgccagcagctgtcgctgtttgatgcgggataa

SEQ ID NO: 2076 - DNA, 717 bp, Oscillibacter sp. CAG:241
atgagtgaaaccccggcttatgtgaagaatttaaagaaggagtctgttgtgcagagcgtcatcaactgtctgacggacgctatgcgcagcaaggagctcaagcccggcgaccgcatcccgcctgagccggagctggccgcctctatgggcgttgcacgcagctccgtgcgggaggccatcaagatcctgtcgtatctgggtgtgctggagagtaagcgagcggagggtacctttgtctgcagcggctttcaggagagcatgatcgatcccatgatctatggcatcatcctcaatcaggattcctccgaaaacctgatggagctgcgggaaatggtggagtccggcattatgcggctggccagcgcaaaatacagcgaggaggcgggccgcgcactggccgccatactggatcagatgaccggcatcgtgcagagcggtgaaaatgtggtagaccgcttcttcgaggtggataacaccttccacaacctgatctcgcagatggggaagaaccccctggccgacaagatcagccgcgtcgtccgcaccctgacccatgccatgcgctatgaaacggtagccactatgctcaacaccgggcgcggcgaggagctgattgccgcccaccgctgcctgctggaaacgctgcaaaaccgccggctggagaacgtggaggagcttgtccggaccacctacttcgaggatgccctccacatctga

SEQ ID NO: 2077 - DNA, 717 bp, Oscillibacter sp. CAG:241
atggtgtcctccccggtggtttttctctatcatgccatattcttccgggatttgcaaggcccgccgcccacaggatggaattttacaggaagggtagaaaaacagggaaaaatctgctatactgtccctcgaaatcaggaaccgaggaaaacgattatgctggagatccttttatacgcgggcagggccattatgccgctgctgctgaccatggccctgggctgctggctgcggcgctctgcccattggagcgatgatttttaccggcagctcaacagcttctgctttcatgtgctgctgccggtgcagctgtttctgaacgtatacgccatcgaggacctgtcggtgctgaattggcgtctgctgggcttcatcgtgctgtgcgttgtgggtgccgcagggctgggtgtggccgtggcgccgctgtttgcccgggaacgggcgcagcaggtagtcattgcccaggccacgttccgggccaaccaggtcattatgggcatcccgctggccagcgccctgggcggccgggacgcgctgattttcgcgtcgctggtcacctccgtgtgcgtgccggtattcaacatgctggcagtgctgatgctgacggcatacagcgcagacggcaaatccatctcctggcgggaggaggtgcggcaaatcttccgcaaccctctgattctgggcgcgctggcgggtctcgtcaccgtactggtgcgg

SEQ ID NO: 2078 - DNA, 1494 bp, Oscillibacter sp. CAG:241
atggaattggagctgaaatttacggaagtcaccggctgcgagccggtaggcgacctggtgactacccaggaggagtccatggagaccgctatcccggaacactgcccggatatggcccggatcgtggacacggtgggtcagctgcggctgcgggaaaagcacctgaccggtcagcagctcaccgtaagcggcagcgtggtgctgacggtgctgtacacctcggaggagagcgcgggcctgcggagcctgtccatggaggtgccgttttcctgccaggtggaggataaacggctcatgggctgcaccgccgtgtgcgttgccgggcggctgctgctggccgaggcccgggccgtcacggcccggaagctgtatctgcgtgtgatgccggaattcaccgtgtccggctatgccaaccggaggcagcggctgtgctgtggcgtcggagaggacccggccctgcgggtgcggcggcaggagacggagctggagctgctgacggcggtggaagaacgggaattttccttcactcaggaggctgtgccggagggcccgccgccggaggacgtactgatggagcaggccgccgcccgggtggaggaatgccggcgggtaggcagccgtctggtggtaaagggtcaggcagaggtgtgcgttctgtaccgcggagacaaccaggagctggcggcctatcggaccgcgctgcccttctcccagctgctggacggcctggacctgccggaggatgcggacgtggaagcccgtattccgtgggtccacagcgaggcccgggtgctccggacggaaaacggccccgcgttcggcatcaccgtcacggtatgcgcggcgctgtttgtcaggcgcaggcagcagatcagctgtatcgaggacctgtacagtctgcggcaggtggcccgggtgcagcggcaggagacagacctgccggtgtcctggcggcgggagacccccacccaggaggcagtgcagcagctggagttcggccagggccggccctttgcgtatctgacggcggcagactgcggcggcgtcagcgtggtgcaggagggcggcagcccggccctgcggtgtacggtgcggctgcgggtactgtacctggacgagagcgggacgcctgtgtgcgcggagcgctctgtggaggtaacagccccggtgtcctgggagccgcagacggtccgcgccgcctgcggcctgccgcagctgcaattcaccggcagtgcctgccgcctggcggtaccggtgacctttgaggcctgccagtgccgtcgccggccggtaccggcggtgtcggcggtggagcttcaggacccgccgccggagccccagccgtctctgatcctgcgccgcatggcagagggcgagaccctgtgggacattgccaagcagtaccgcacggaccaggacgccatccgctccgccaatgagctgacggaggaggcccgtccggagggtatgctgctgatcccccgggtgcggtga

SEQ ID NO: 2079 - DNA, 1182 bp, Oscillibacter sp. CAG:241
atgccggagaagcagctgcggcggatgaacgcacactatgccctgatacagggcctgttctggggcggatacgccaccatatgggcttttttgacggtactgctgctgtaccggggcttttccaacagccagatcggcgtggtatcgtttctggcgctgacgcttcctatcgtggtgcagccggggctggcggcactggccgaccgggacggacgtttcaccagccggcgtctggggttggcgctggtgtgtctggcggcgaccgcggcgggagtgatgtgggcctggggagccaaccgcctgctgacggcggtgctgtatgtactcatcggcgtatgcctgacggcaacgcaaccatttttcagctccatggctatggagtggcagatggccggggcagacctgaacttcgggttgggacgaggcatcggctcggcatgctatgcggcgctggtgctgctcctgggtcagctgacggagcggtacgctccgacgctggtggttccggtgtttgcgggactgtttgcgatactggccctggcggtgtggcgattccggtcagcgccggctcccagaatggaaggggagaggccccgggttcttaccaacctccagctgctgcggaaatatccccggtttgtgctgctgcttgcggcatgcgcactgctgatggcgtgccacagctcctcatgtacttatatgatccacatcgtggagaaggccggggccgggtccggagccatgggtgcggctttggcattggcggcgtttctggagctgccggctatgggactgttcagccggatgcggcagaggctgtctctggcatggctgctgcgtctgtgcgcaggtgcgtttctggcgaagatcgtagttttctggctggcggagtctatgaccgccatctatctggcatcggtgctgcaattttttgagtacgggatcttcactccggccaccgtgtactatgtggtggagcacattgatcggggcaatcaggtgaaaggacaggcattgatcagcgtggcatcctccggcgttgggtcggcctttgggtccctgtgctgcggactgatcctggaccgggccggggtcagcggcatgctgctgtttgaagtagcctgtgctgctgcgggatgcgtcgttatgctgctggccaccggagaaggcaagcggaaataa

SEQ ID NO: 2080 - DNA, 744 bp, Oscillibacter sp. CAG:241
atgggaaaaatcatagcagtggtctccggaaagggcggcaccggcaagacctccttcaccgccaacgtggggttggctctggccgccctgggaaagagcactctgtgcctggactgtgacattaccctgaggaacctggacctggccctggggctgacagacagtgcactgatggacttttccgacgttatagccgggcgctgcgcactgtcggacgcggtggctgtccaccccaagtatcccaagctccacctgctcaccgctcccctgtccgccaccgggcagctgaacgtcaccatggagcagatgaaacggctcctggatcaggtgcgccggcagtatgactattgcctcatcgacgccccggcgggactgggtcagggcttccagctggccaccggctgcgccgactgcgtggtggtcatcaccaccaccgacgcctccgctctgcgggacgcgcagcacaccgttatgatcctggacaagcgcttcaccacagagagcctgtttttggtggtagggcgagtacagaaaaagctcctgcgggccctgcacagcaccatcgacgacgccatggacgctgccggccttccccttctgggcgtggtcccggaggacagcgacgtcccctattccctcaaccgcggcattcccctgcgggacatgaactactatgccgcacggtcctatgaaaacattgcccgacgcatcaccggccagcgtgtgccgctgatgcggatctga

SEQ ID NO: 2081 - DNA, 612 bp, Oscillibacter sp. CAG:241
atgatccaagtcaacgccgtaggcgacgcctgccccattccggtggtcaagactctgcaggctctgaagactctggccggtcccggcaccatggagactctggtggataaccgcatcgccgtggagaatctgacccgtctggcccagagcaagggctgcaccatcgaaacggagcagctggcggaaaaccgcttccgggtcaccatcactgcccaggccggagcccagctgcccgataccgccgacggcatctgcaccgttccctccgaaaggcccgagaacaccgtggtggtgatctccgccgaccacatgggccagggagacgacaccctgggccgggtgctgctgaagggcttcctgtttgccctgacccagcaggagaagctgccccgcaccgttctgttctacaacggcggcgctttcgtcacctgcgatggctccgcgtccctggaggacctgcacaagctggaggcgctgggggtggagatcctgacctgcggcacctgtctgaatcattacggcatcgccgacaagctccgggtgggtcaggtgaccaatatgtacgtcattgccgagaagcagatgaacgccaccctggtgatccggccttga

SEQ ID NO: 2082 - DNA, 495 bp, Oscillibacter sp. CAG:241
atgcgaagaacagacagagagcgcggccaggatttcgcctgggacgtgctgaaaaaagccccctacgccacgctgtccatgacggaccgtcagggtcggccctatgccgtgccggtgaaccaggcggtggatgaggaataccatgtggtgtattttcactgcgccggagccggagagaagtgggagctgctgaaggacggtgctcccgtgtgcctgacggcggtatcccacgccatgtcagtgcccaatgccttcaccatggcctatgccagcgcagtgctgcggggccaggcggaggtagtgacggatcaaggcgagtggacacgggccatgctccagctgtgctccgccttcgatcccaagggcatgggccgctttatggaatgcgtggagaagaacggtccggcgacccgggttatccggatcacccctcaggagcttaccggcaaggagaacaccgccgtggagaagcatcaccaccaccatcacgattga

SEQ ID NO: 2083 - DNA, 429 bp, Oscillibacter sp. CAG:241
atggaatatatcacccacagtccggccgagaccgaggaactgggctgccgcctggggcggaccctgcggcccggcacagtggtggcgtatttcggcggcctgggcatgggcaagaccgcctttacccgggggcttgcccaggggctgggctgccggggccgggtcaccagtcctacctttaccattgtcaacgagtatgacggccccactcccctgttccacttcgacatgtaccgcctgcccgacgccgatgctctgtttgacatcggctgggaggattatctggaccggggcggcgtgtgcgctgtggagtggagtgaaaacgtccgggacgctctgccgccggacgccgtcactgtcaccattgcccgctgtccggaaaatgacggctggcggaccatcaccattgaaggaggggaagcactgtga

SEQ ID NO: 2084 - DNA, 783 bp, Oscillibacter sp. CAG:241
atgcattatggcatgcatgccataatgcatagaaaggatgtgatccccacgaccattaccagtgccagcctgcccgctaaaaagcggatcctcaccgtgtgcgtgaagctgtttctggaacaggggtacaagaaaaccaccgtttccgaaatcgttcataaggcgtcggtatccaacagcattttccagaacattttccgggccaaggacggggtcctgacggagctggtggagttcatgttttccaaccagttcgccatggcccgcaccacggcgggagcccagctgccgccggtgtatgtctacgctgtggagaccgccatccagatgaccctgacggagctcaatgagaacctgcgggagatctatatcgaggcatatacccagaaggaggcctcggactatatctttcaggagacggccaaggagctgtaccagatcttcgggccctatcagccggagctgacggcccgggatttctatgccatggagatcggctcggcgggcatcatgcgcagctatatggcctgcccctgcgacggggagctgaccctggagaaaaagctgcggatgtttttgaccatgagcctgcgggcgtaccgggtcccggaggcggaggtggagggagccatccggttcatcgaggggctgaacatccgcgccattgccgagcgggtcatgggggagctgttccggactctggccatgcattttgagttctccctgccggataccgcaccgggacagggcggggacagcccgggacaagccgggacaacgtga

SEQ ID NO: 2085 - DNA, 600 bp, Oscillibacter sp. CAG:241
atgaagctgtttcccgtaaggacgcaggccccgaggcttccggcgctggtactggtgtgcctgctgctgtgcctgggtgctgcactgggctttgccgtctgccgggctgtgccccagcaggaccgccaggagctcagcgattatctgcatgaatacgcccaggccacagcggatggccaagggccttcggcctcggcgctcagcgtgggcgcggcctatttccgatatccggcggctgcgctgcttctgggccttacggcagcgggattggttctgctgccggttctgtccgtggtacagggctttttcctgtcgttttccgtgggctgcttcgcccgggcattggggcgcggcggcgtgtatctggccctagcggcctttggcccccgctgcttgttcgttctgccctgcaccctgcttctgacggtgcagggtttatccgccgccgcgcaccgccgcagcggacagcgcaccggcctgccggatgccgcctattggcggcgggcagggctgtgctgcctgatactgctgctgggaacggccctggagctgacgctggccccccggctgctgcaatgggtcatcgcccgtgtactgtaa

SEQ ID NO: 2086 - DNA, 357 bp, Oscillibacter sp. CAG:241
gcccggtgtgtgatcaggtgcattgtagcacacctttatccaaaaagcaactacctgaaaaaatccccgccgtccggcccggaaactcccggattgacggcggcagggaagtacggtatactgggaaaaaatgatggaggagctgctatggaatatgttgccgtgattggcctgctgtttgcccctgtgatctgtctgctgtgcgcaggctggttttttgtccggtggaaaaatgagcacgaaaatcaaaagctggccctgcgggaccggaaaacctgcttcgtctggctcatcgccgccgccgcatccctggtgatcttcggcgtgctgaagctcctgtttcctatcaccgcctga

SEQ ID NO: 2087 - DNA, 1323 bp, Oscillibacter sp. CAG:241
atgaagctgctggcatttttgctgtgcggcgtatgtttttttggactgtttggtttggaatatttcttcctgctgcggcccagccgcaccttgggcgttactgcggtggccttcattgtggtttatgtgctgatgaccaaggtttatggcggtttcgacatcggcaaacgtaagagcaagcccatcgtgttctccatggccctggtgctgctgctgacggatttggttacgcattttctgctgtgcatcatgaataccaccgtcatccacggaggccatttcgtgtatgagcggccgctgctgctgctggcggtctatctgctgcaggtagccctggtgatcgtcatggcttatggcggaaacgatttgtacttcaaggtcaacaagccccagcgctgcctgatggtggcccgccgcggggagtgcgtcgaggacctcatccggaaggtcggccgctacaagaagcagtataacatccagcaggtggcctggctggatcagccggacctgctgtcctgcgtggaccaggcggatgccgtctttctgtatgagctttccgtccatgagcggacggaactggtggagtactgctatcagacccgcaaggacgtgtattacagcctggagatgtccgatgtggttgctatggccggggagcgcgtcatgtttgacgacaagaccctgatgttctgccccgtccgggagctgcgctttgaggaacgcatcgttaagcgcacaggcgacattctcatctccctgctcggcttgattctgacgtctcccatcctgcttgtgacggctttggccatccgcatggaggaccacggcccggtgttctaccgccagaagcgcgccacttacggtggccgcgtgtttgaggtgtacaagttccgctccatgcaggcccaagccggggacattcacgtctccgccaccaagggggaccagcgcatcaccagggtgggccggattatccgcaagttccgcatcgacgagctgccccagctgatcaatgtcctgaaaagtgatatgagcatcgtgggtccccggcctgaaatgctggagaatgtcgagaaatataccaatgatcttccggagttccgctatcgcctgcgggccaaggcggggcttaccggtcttgcccagatctatggcaagtacaacacatccccccgggataagctcattatggacctggcctacatccagcaatacagcgtctggcttgacctgaagctgatcctgcgcacggcgctggtgctgctgacgccggaggaaagcaccgaggcgtttgaggacaaaaaaacggaggaaaaaccgtaa

SEQ ID NO: 2088 - DNA, 693 bp, Oscillibacter sp. CAG:241
ttcggggctttcgttattttgaagcacgcagggcctgtccctctgaaacgggtatggacagcttttggcctgcgtggtataatatccgaagaatttaaggctttcacttttgaaggaggatgctctatgaattgtcttgttttgctttcgggctgcggcgtaaaggacggatcctgccctgaggaggtggcactgacctacaccactctggaaaaatatggatgcgcctatcagcctgtggcggatgatatcccggtgctcaccgtggatcatctgacgggccagcctgatcaggaacgccagatcctgaaagaatctgctcgcctgggtcgcgggatgctgcggaaaattcgggatgtttgctgggaggattacgacgcactggtgatacccggcggactgggactgttgaccaattaccagcactcccaggctgtggctgactgtgtccggtattttgctgccgccagcaagcctattgcagccatgtgcgctggtattgacttccttcggggcctgttgggcggcgatctgctgctggaagaggtgccgccgctgaaggcgacggaatactgctgcgaccggcagaagaagattttctacacccctgccttcaaaaagaccgactcctgctatgagatcatgcagggcatcgatgccatgatcgcggactttgcaaagacttccgcctga

SEQ ID NO: 2089 - DNA, 561 bp, Oscillibacter sp. CAG:241
atggcggagaacaagaacaggatgaataacgagccggtgttcggcagcctggcttatgacctgaataccctgaactgggagcagcttgacggcaacgccgtccgccagccccaggagcccctgcgccgcccggagcgggatatccgcccccagcgggagtctcgccgccgtccggcggcccgcccccgggagcacgcctcccccattctggtgggcggcgtggccgttctggccctgatggtagtggtgctgatgatgggctatgtgaagctgacccaggccagccacgaccttaccgccaagcagtcccagctccagcaggtccaggaggagcgcgtggccctgggcgtggcatatgaaaaggccttcgaccaggccgccgtaaaggccgccgcccaggcggccggcatgaccaagcctaccagcgaccagatcgagtatatcgagctgggcggtgcggatatggccgagatctgtcgtcccgaaagcaccggacccctggcccaggcatggacctggctcaaggacggcatcggcgcggtggtggaatatttccgctaa

SEQ ID NO: 2090 - DNA, 693 bp, Oscillibacter sp. CAG:241
atggagattctgcgcatcgagcatctcagcaaggtatacggccagggggagaatcaggtccgggcggtggacgacgtgtccttttccgtggaaaagggggagtttctggccatcatcgggccgtccgggtccggcaagtccacgctgctgcacattttgggcggcgtggaccggcccacctccggcaaggtgtatgtggacggccaggacgtatacgcccaggacgaggaccatctggccattttccgccggcggcaggtgggcctgatctatcagttttataacctcatcccggtgctgaacgtggtggagaatatgacgctgccggtgctgatggacggccgtgcggtgaacaggcagcggcttgacgagctgctggatgtgctgggcctgcggggccgggaaaagcacctgcccaaccagctgtccggcggacagcagcagcgggtgtccatcggccgtgcactgatgaacgccccggcggtggtgctggcagacgaacccacagggaacctggacagcaaaaacagccaggagatcgtggagctgctgaagctctccaaccggaagtacggtcagacgctggtgatcatcacccacgacgaaaacatcgccctgcaggcccaccggatcattgccatcgaggacgggcgcatcacccgggatcaacggatccgggaggtgcaaaaatga

SEQ ID NO: 2091 - DNA, 324 bp, Oscillibacter sp. CAG:241
ttgtgtaaaacgagggaatggacaaaaagcaacataaagcctgtaccgggaaggctctacaaagagttatccacagtttccacagggttttccacaacggctaaatgctatgtgccgcaaccgttttccgggattttaccaggatttttccaggacgaaaaacgaagtttttcactccgcgaaagctggggaaccggtttacataaccgcataatttccgttctcctgttacaagctgtcattcttgctggcataataggcgctgatgcaggcggtcagccaaaatatttatcccggaaggggacctggtctacctggaagctg

SEQ ID NO: 2092 - DNA, 225 bp, Oscillibacter sp. CAG:241
gctgcgggactttacggacctgctggacgctatgagggggtgatcgacatgccattttggggagccgctgtgctgttcatcctggcggcagccgggtttttcgtaggacgggcctgcctgcgccgtgggccgcgcatcgtctgcatgatcgtatgcggcattgcagctgctgccagcgctgcatacatgctgctgactctgatcctggtaggcggcatacagtaa

SEQ ID NO: 2093 - DNA, 843 bp, Oscillibacter sp. CAG:241
atgaacgttgaattgattgtagattccacggtggatgtgccggagcgcgtccgcagcagactgacggtagtgccgctgaccattcatttcggacaggaggagtttctggacggcgtgaccatggacagacaccggttttacgagcggctggtagagagcgacgtgctgcccaccaccagtcaggccagcccggcagcctttgaccgggagcttcgccgggtgcgggacagcggcagcgccgccgtggtgctgaccatatcctccaagctgtccggcacctatcagagcgcctgcatcgcggcggcggactacgacaacgtctatgtggtggacagcggcactgccgccattggaacggggatactggcggagtatgccctgacctgcatcgaccggggcatggatgctgccgccctggtccgggagctgacggagaagcgggaggacgtatgcgtcctggcgctggtagataccctggaatatctcaagcggggcggccgcatctccaagaccactgcgctggccggggggctgctgaacatcaagccggtgcttaccatcgaaaagggggagatcctcctgatcggcaaggcccggggctcccgccagggaaacaatctgctggtggagaagatccgtgcctgcggcggcatcgactttcaactgcccattctgttgggttatacgggtctgacggatgtatttctgaaaaaatatgtggaggacagccgtgccctgtgggaaaacggcgtcgatgggctggaatccacgctgattggcggtgtcattggcacccatgccggtcccggtgccatagcggtggcctttttccgcaggggatag

SEQ ID NO: 2094 - DNA, 240 bp, Oscillibacter sp. CAG:241
atgggaaacgcacctgatctggactggggcaagctattcaaggctgtatggagatatgttctgctgcttgtgggcgcatggctggccctgcgctattgcagctatcacgacagtgtcatgggcatgttcttcgtggcctgcgtggtggtgatcatctgcaccgccatgatcatccgccggctgaaccggctgcaaaagaccatggaggaaaaaagtaaccgcactccgtttattttttaa

SEQ ID NO: 2095 - DNA, 1074 bp, Oscillibacter sp. CAG:241
atgaaaacctatgaaagcccgctgcaggaggcggcggagcgcttcccccagacgctgctttggaacgactcctgcggcgtggcggatctgaatctggccctgcgtcacggcgccaccggcgccacctccaaccccgtcatcgtgggcaacgttctgcgcaaggagatggccgattggaaggatcggctcaatgccctgatccatgtggaaatgcccgacgccacggatgaggaaatctgctgggctttgtccaaggaggccgccctgaagggctccaacatgctgctgcccatgttccgggagagcagcggcgtcaagggctggcaggccatgcaggtaaacccccgcttctaccgcagcacggaaaagaccgtggcccacgccgccgagctgtccgcgctgaatgagaacattctcatcaagatgcccgtgtccaccgccgacattcccgctctggaggagtgcgcctatcggggcatctccgtcaacggtaccgtctgcttcggcatcccccaggccgtggccgtggccgaggccgtggagcgcggcctgaagcgccgggaggccgagggcaagcccattgacaacgtgcattgcagctgcaccatcatgaccggccgcctggacgactatatgaaggccctggtggctgagcgggaggtgcccatcacccaggaatatctggattgctgcggcgaggccctgttcaagaaggtctacaagctgtacaagcagcggggctatcgcctgaagctgctggtggccaacaacaacagccacttcctgtggagccgtttcctgggcggcgatattctgatgaccatcaaccccctgtggtggcggcggatgaacggcgccaggctgcccatccacgaaaccatcaacgaagaggtcccccagtacatcgtggacgagctgctggacaagctgccggagtatcgggccgtttactttgaggacggcctgcaggtctccgagttcaaccagtacggcgccttcaagcgcaccatgaatgagttcttcaccggctacgcctccttcctggagtatctgcgcggctttatgctgccctga

SEQ ID NO: 2096 - DNA, 585 bp, Oscillibacter sp. CAG:241
atgaccacggagaccttttttcagctgcactatcacctgacggatacggaggggctctttgacctggctcaggggatcgcggtccagcggcgcagactgaaaaagcatgacgcccgatgccgcagcttccggtggttttcccggcggcttctgtggcagggggccgtcctgctggcgctgggagccgttttgctgtggcttacggccagcctggcgctgggccgggcgtccggcgcgcttacggggctgtgcttcggctgcggggtgctggagctggtgctgtgcgcgcttatgcagcggaattaccggcggggctggcggcagtttcagcaacagaacgatcccgatgggtgcattctgtttgacggcggcggcatccgggaggagaaccggaaggggaagcccacccatttcgactgggaggattgggacgtggccgtggtgactcccagggtcatcgtgctgaccttccgtgttcccgtgctgctgttcttcccctatacggaggaagcggcgatcacagtggctcatgcagcccgggccttcggcaaggaggatgcggtggtttaccggcaaaagatctga

SEQ ID NO: 2097 - DNA, 435 bp, Oscillibacter sp. CAG:241
atggaaacgtcttacaccgcgtcctctgcttcccccgccgtgcagctgcccaccaaccgcagtctgctgaaattcgtcctgctgtccatcatcaccctgggcatttacggcctggtggtcatgaccaagatcagcaccgagatcaacaccattgccggcccctatgataacaaaaaaaccatgaactactgcctggtggtcctgatcttctcctggctgactatgggcatcgtgcccctggtctgggcccaccgcttctccaaccgcgtgggcagtgagctgctgcgccggaacctgccctatcagttcgacgccggaaccttctggctgtggaacgtgttgggttcgctgattgttgtaggcccctttgtctacacgcacaagctgctcaccgctatgaacatgctctgcaccgactataacgccaagggctga

SEQ ID NO: 2098 - DNA, 1002 bp, Oscillibacter sp. CAG:241
atgagactgctgcggaatcgggaggttcgccgggagctgctgctcctgacggggatcacggcggctctttgcgccgtgggctgggctatggcgggcccttgctgcgccgggctgctgctggtgtccggggcggcgtctgcggcggtgtatctggtatccgcccggcggcggtaccgggcgctggcggacatgagtcaggacatcgaccgtgtactccatgggttggacagccagaccatcgccgcctgcgacgagggagagcttgccatcctgtccagcgagatccggaaaatgactgtccggctgcggcaggcggcggacagccagcatcgggaacgcatgcagctggcggatgccatggcggacatctcccaccagctgcggacgcctttgacagccatcaacctgacgctgtccatgctgggacgggaggggctgccggaacaggagcgccgggcacttctgcaggagctgcggcggctggtgacccgcatggagtggctggtggagacacttttgaaaatgtcccgcattgacgcgggagcagtatcgttccgggaggagtcctgccgggcggcggacatcatccggcgggcggcccagcctctggcggttcctatggagctgcggggcattaccctggaaacggcggcaggagaggagtgcttcaccggcgacgccgcctggagcgccgaggccctgggaaacgtgctgaaaaactgtatggagcacgcggcatcctacatccgggtatccgcccgggagacagcgctgtttacggagatcaccgttcgggatgacgggccgggcttccgggcagaggatctgccccggctgtttgagcgattctaccgggggaaggatgcagctccggccagcgtgggcattggcctggccctggcccggatggtgctttcggcccagaacggcaccatccgcgccgataatgcctgtcccggcggcgcgttattcaccttgcgctggtacaggagcacggtatga

SEQ ID NO: 2099 - DNA, 915 bp, Oscillibacter sp. CAG:241
gtggatgtttcacgtgaaacatccacctttttcattatttcttctgtttcacgtgaaacatttttctcaagttttttctcgttttgcaaattttctattgaaaccgctcgaaaatgtgatatactaaataaaaagactgacagaaagcgagtgggaaaagtggcgaaaatcgtagcgatcgtgaaccaaaaaggcggcgttggaaagactaccacctgcgtcaacctggctgcggcactaaaatatctgggaaagcgcgtgcttttgtgcgattttgacccccaggccaacgccacttccggcatgggcgtggacaagtccacctccaacggcgtatatgatgtcctcatcaacggcgtggacaccgccaaagccatcgtcgccacgccttacggcgacgtgctgcccagcagcaaggccctggcaggcggcggcgtggaaatgatcgagctggcagaccggcaatttctgctgcgcaacgccctgaacggtgtacgggaaaactacgactacattttcatcgattgtcccccttccctggagcttctgaccctcaacgctctgtgcgctgcagattccctgctggtacccttgcagggagagtattacgccttggagggcctcagtgacctgatgaacaccgtgcgtattgtccgccggaatatgaatccacatctccagatcgaaggcgttctgctgaccatgttcgacggccgaaccaacctggctatccaggtggcgcaagaggtgaagcgattcttccccggcaaggtatatgccacggtgatccccagaaatattcgcctgtccgaggcacccagtcacggaaagcccattaccgcctatgatcggacctgccgcggtgcggaggcatatctgtcactggccaacgaatttctcaagaaaaatgtttga

SEQ ID NO: 2100 - DNA, 687 bp, Oscillibacter sp. CAG:241
atgatgatcgagaagagcggcaccatccggctgaaggatatccacattccccaggggggcacgccggagcagcaggagctggcccagggcatggtacgggtgaatcacctgtatcgcagcgctctgaaggtcgccgtcacccagctggagatcctggacgaggaatttgccagcctgtacgaccactctcccatccaccatatcgagtaccgcatcaaaaccgtggacagtatcgtggaaaagctgaagcgccgggggtttgaggtcaccatcgacaatatctatgcccacatccaggacgtagccggcgtccgggttatctgcaactatctggacgatatctactatctccgcagtctgctggcccgcaatgagaatttcaagatcatccgggaggtggactacatccagcagcccaaggagtccggctaccggagcctgcacctgatctgcgatgtgcccatcgtgatctctgagggaatgctgcacctgccggtggagatccagctgcgtaccattgccatggacatgtgggccagcctggagcatgagctgcgctataagtcgcagcgggacttttcccctgacgacgcggcgcgcctgcgcctgtgctccgacgccatcagcgagatcgaccgggaaatgcaggatatctaccagggcagaggcccggaataccacgcatag

SEQ ID NO: 2101 - DNA, 3561 bp, unclassified Butyricimonas
atgaaaaaaaatcgaatcggcacaagatccgatggttggatttttgtccgaaaatgcgtgttgatgatgaaatttgtatttatttttatgatgtgttgcctttttcagattcaggcagcagtgtattctcaacaggcgaaagtgtctgtggagtttcggaacgtgtcgttggaaaaagtgtttcaagagttggaacgacaatctaattgtagtttcctttacaatcaccgggtggtggaagctcgaggtagggtgagtattcaagttgttgataaagagttaagtcaggttcttgacgagttgttgactaaattgggattggggtttactttcgatgataatctggtgattataaaagaacgtacttcgatgtgggggaaagattctgttcaaaagggatcgcggatcgtggggagagtcgttgacgagaaaaaacaggccatgcccggcgtgacggtgaaattgacgggaacgactttaggaacggcgacggattccaagggaatttttagtatgacgttacctttggcaaagggagcgttagaattctctttcgtgggttataagacgcagagtttgactttctcggcaaccatgcgagatacgattcggatcgtgatgcaagaagatatacaggctttggatgaggcggtggtagtggcatacggaacgacaacccgtcgggaggcaaccggggccatctcggtgattaaagcggatgaattgaggggaattccgtcggggagtattgccagcctgttgcagggacgggttgcgggaatggacgtgacgaacattaccggggcgcccgggggaggtggaacgattattaccatccggggatataattctttggacgtggaacagaagagtcgccagttttcgaatcccttgtgggtggttgacggggtgccattgaattcgtttacttcaccgattacgggtacgaacctgttggccgagataaaccccgatatgattgaatccgtgcaggttttgaaagatgcctcggcagcctctatttatgggtctcgtgcggcaaacggcgtgattatcgtgacaacgaaaaaaggacgggcgaatcaaaaggctactttttcagtcaatgtttcccaaacgtggagcgtgttacccaagttaccgacgctgatggttggacgggctgaacgatggtggcggataaaggcattacggaatatgcctaaagcttatctggattgggaaaacaggcaatataaatacccgagttctatatccgagatggaaaagaatcgattgtcttttttggattggttttatcccaaaagtgattcccaaccggcagacgggattattcttcaggatagtttgaatgcgttttataatcatgcgacaaatttctttccaatgtactttgaaacggggaaagtgacgaatgcgaatatacaggcatacgggggatcggacaggataaactatggtatcggtttgggatattataacgaggcaggtgtgttgaaaggaactggatttaatcgtgtcgatttgacgaccaacctgaacgtcattccgacgaatcgtttaaacgtggatttgcgtttctatctttcattgacgaatcgtaaaagaagttccgagaatcaaatggaaggttttcaaaccagtacgaacgtggatgttattcccggtgatccttttgaattgacaaccttacttcccggtaaagggagcgtggtgtgggatgaggtgttgaaatctcttcagggtataaaagaaaagaatcgatccgtgaggggaagggctaatataaagatcggttatgacgtgttggaggggttgaatgtatcaacttctcttgccgcggattactcgattcatagacgtcactatttctcgccgtcttatttggatacggacgggtattctataagcataggggagaccggaattaacgtgatggctttgagcgaaaccatgttaacctacacgaagacgcttaaggaagaccacacgtttaatgtgcttgcggggttttcctaccaatatgatcaagaggaatataatgggggcagtggccggaattctcccagtgataagatccagtatgtacccaatggtttcccgacgttagcggaaaaagaaatttacgattataaggaggtgattcccttgcaggcatacgaatcagacatgaaagaaaaatccttactatcgtggtttgcccgtttggagtacgattatcagaaaaagtatttcatttcagcaagttttcgtcgggatggaagttcaaccttcggggcgaaaaatagatggggaacctttccttccattgccgggggatggaattttagcgaggagagttttatcaaggataatctggaatggttgagttttggaaagatcagggccagttggggacgttccgggatgcatttcgaggagtgttacttggctttgggatcgctgtattccggacagccgtttatgggagagagtaccttgtcgtggggaaacgggttgtataacgaggagttatcgtgggagaaaacagaccagtatgatttcgggttggatatggatatgttcaattatcgcttgggtttgacgttagattattactatcgttattcaagtgataagttatggcagattgaattaccgggggattataacggttttgcttatcaatggagaaatgcagcggcggtatctaacgaagggattgaattgttgatccggtacgagatattccggaatgataatttgtattggaagatttcagtgaacggggccaagaattggaatcgattcgagaagtcatacacgggggaggatattccccgaattggtattatcgggaaggctttaaatgggatatatactttggcaaccgatggttttgtgaataaacaggatgaattgcctgttacttacaataacgcgggaatcagttcttatttgaataatggagataaaagtacattttataagccgggagattataaatttatagatgtaaatggggatggaattatcagtgaagaagatcggatttaccaagggagtgccttacctgtcgtgacgggaggtatcgtgaacgaggtacgttggaagaatttcgatctgaatatgtcggttaccttccaaatcggccgacatatcgtgaatgcacaggcaaatgcctcactaaagacaagttatccgaacgaaattttgcatccgtttttgctgaatatgaataagcagcatttctggcagcaaccgggagacacgggagcgagatacacgcaatggcaaaccaatcaaggggttggaaactataatactacagatcgggatgtggaaaaggtgaattggttaaagttaaaaacattgtctatcgggtacacgttgccgacatctttaatgaaatcttgtaagttggaacaggtacgttttttcgtgagtggggagaatcttttgtcttggcacaattattccggtctcgatcccgaaatcgtggatgtacgcacgggattcgacgagggaaaaaattatcccttggcacgtaagtttacattgggtttaacggttaaattttaa

SEQ ID NO: 2102 - DNA, 2220 bp, unclassified Butyricimonas
atgagaacacgactccttctactcctgctttgttttatcggtcttttgacatcttgccaaagagaaaaagaaactcgagtaacggattttgttgatccattcatcggcactgccggtcagggacactgtttccccggggcgaccgtcccgtttggcgggattcagctcagtccggataacccaagaagtggttgggagtggtgttccggttatcattacagcgatagtattatatcctcgttttcccattcgcatttgagcggaacaggtattggggacttacaggacatccgcctgttgcctgtcacgacccgcccgcaagtgggagaaaaagcgatcgatttcatcacgaaaggatatgccaaattctctcatgccaatgaaacggctgaaccgggatattacagcgtgaccttcgacaacgggattaaaaccgagttaacggtaacctctcgttgcgggatgcactcctatcaatacccaaccaactcggtttacggattaactcttgacctgacaaccgcacgtaactgggaccggaccgtgatgacctcgatcaagaaaatcaataaccggaccatacaaggataccggaagtcaaccggatgggcaaaagaacataatgtttactttttcatggaattttcccaagatgtagacgtctgggctggaaatgacacgctgaaattattaaagaacgggcagaaactggtttccaatcaaggatacgcgttcattgatttcggaacaaccaccaataaggtcctcgtgaaagtaagcctttcctccgcgaactgcgagggggccgccgcaaacctagacaaagaactttctcactggagctttgacaaagtgaaacgggaggcgaaacaacgatggaaacgcattctatctagaattaaagcagaaggtgccagcaaagaagaaacgagagttttttacacggcattataccatgcctatttggctccctatcttttttctgatgcacacgggaattacaaaggttcggacggagagattcatagcgtgggtaaagcaaatcaatacaccgtattttcattgtgggacaccttccgtgccgctcatcccctgttcacaatcacccagaagaacagggtaaatgacatgataaaatcattcattcgccattacgaagcccacggcttgctcccgaactgggaactgatgggcaacgaaagtcattgcatgatcgggaatcacgccatccccatcatcacggaggcttacttgaaaggtattcgggatttcgatattgaaaaagcctacgaggccatgaaagaaacgtctctatcccaagggaatggactgggactattcagaacttataactatattccctgtgacctcgaaaaagaatctgtttccaaaaccctcgaatacgcctacgatgactggtgtatggcacaaatgaccaaagccctgaataaagaggatgactacctctatttcatggaagcctccaagaactataaaaacgtgttcgattcctctaccggtttcatgcgggcaaagctttccgatggaaactggaaaacacctttctccccgtttgcttcggcccacagggatgatgactacaccgaaggaaacgcatggcaatattcatggtttgtaccacatgacgtggagggacttatcgcattacacggggggaaaaccgctttcgccaacaaactggacagcctgttcaccctcccctcaaccatcgagggggacaatgtttcccccgacatcagcgggttgatcggacaatacgcccaaggaaacgaaccctcacaccacgtggtttacttgttcaattacacggatacgccctacaaaacacaatattacgtggataaaatcagacgggaactctacacggatcgtcccgacggactttgtggcaatgaagattgcggacaaatgtctgcatggtatgttttctctgccatgggcttttatcccatgaacccgagtgacggaaaatatcaactgggaacacccatgttcaagaaagtaacaatcaaattgggacaagatcgtaaatttgtcattaaagcaaaccgagaaaacgaccaatatatctacgtgaaagaagttttactgaatggagacaaactcgatcgcacttggattactcatgacgaaatcatggatggtggagaattggaattcgtgttaacacctgaaaatccctcaaaaataaaagaataa

SEQ ID NO: 2103 - DNA, 2466 bp, unclassified Butyricimonas
atgagtaaagtaaaagaagctgttttagctatcttcttcacgttgtttgccctatcggcttttgcccaaacgggaagtgtcagaggacgaattatagatgctaaaacgaagagacccttagagtttgtcaacgtgagtatccgagccacgggaactcaaaccccgttaaccggaacagtcagtgattcaaccggagttttccgtatcaacagagtgaaaaacggaacttacacgctcaccgcctcgtttatcggttacaaatccgtggaaaaagcattcacgatctcgccgacagcaagaaacgtgaacgtgaaaaacatccttttggaagaagacagccaagtgatcgacgagatacaggttgtcgggcaacgggctcaaatgagattcgaaatcgacaaaaaagtctttgacgtggaatccaatatttcccaagccgggggatcagccagcgaactacttgaaaatattccctcggtagaggtagacaacgagggcgaaatctccttacgaggaaactcaagcgtaacgatctggatcaacggtaaggcatcaggcttgtctgcggacaaccaagcccaaattctggagcaaattcctgccgaaagcatcgagcgtatagaattgattacaaacccttcggcaaaattcagtccggaagggacttccggtatcattaatatcatcttgaaaaaaaaccggaaagccggatattacggtagcttccaagtcggggcagacattttgggcgggtataatgccagcgggagtatcaattacagtagcggcaaaatcgaatcttaccttaatgtcggctaccgccaacggaaatccgaaggaaaggattacaccgaccgcatcaatctagatgaccaaggtaatccgatctcctacctgaatcagaaaggctggaatgatcgggatggcggttcgctcttcacccgggcaggcctaacactacatctcacccagaccgaccatatcggaattgaaggattcggacatttcggttcccgaaattccaacaacaccatccgttacgaaagtgatgttcccggatccttcaccagcagcgaacgcatcagcgattcagataactcctcgaaagggggaaatatcaacctcgactacaagcacgaattcagcgaaaaaagcaatctcgtggcccgtgcctcttgggacttatgggtttctgacgggaccagtacatacaaacaacattctctctacccggagaataaagaaacctcctcttggcaacaacaggaaagtgacaaccgctcacaaagctgggaatttcaagcggactacgtgaatcaattcacggaagagagtaagttagaagcaggttataaaggtacgctcagcagccaaaaaagtcccgtggaaacctattccggcgaaacagaggcaactgccgcttttgacgagttattatataacaaatactcttacgaccgaaatatccaagccttatacgccacgttctccacgaaagtgaataacttcgggttgcaactaggcttacggggagaatacacggacacggagaccaaatcactgggatacagagaaaccgaggccacggccattccttataaagacgactatttcagtttattccccagcctgtttctctcgtacagtctcccgaaaaatcatgaaatacaggtcaactacacccgacgaatttcacgccccagaggctggcaattgaacccattcatgaacatgaccgattcgcttaatatctcgttcggaaatccttacctttctccggaatattccaattccttcgagttgaattacatcaagacttgggaaaaacacacgctatccgtctccacctactaccggaacacggacgacgtgatccaacgtattcgttaccgggaaggggatgtcatgaaaagcacgtcggctaacattacacaatcttcttccgccggagccgaaatcgtggcaaaaaacaaactactgaaatttctagactttacaacaaccctgaatttctattataacgaactggaaggcttttcttacctcccggcaggtgcagacaccccggttacgggagaacgggacgataacttctcatggacagggaaaatcattgccaatgccatgctaccgtacgccatctcgttacaggctaccggaagctacaactccaaacagattattgcccaaggccaccgggaggcaagctaccgcttagatctgggagtccggaagtttttctttgaccggaaaataaaccttagcataagcgtgcaggacattttgaattcccgtagttggcacagcatcacttccggtaacggttttaaacaagatagtgatagttggagaaaaggcggggttttccgtttcacgttaagctataacttcggaaacatgaaagcttccaagcaaaagcaacagcgcccttcggaagagatgaacatgatggaagaagagttttaa

SEQ ID NO: 2104 - DNA, 3132 bp, unclassified Butyricimonas
atgatcaatttagcggattatgcattaaataatagggcgctggtaaagttttttattgcagtgctggtgattggaggtatttttgcctttaattcgatgagcaagttggaagacccggaaatcaaggtaaaacaggcgatggtggttacggtgtatcccggagcttctgctcatcaggtggagttggaagtaacggatgtattggagaagtcgattcgttcgatgggggcaatcggtagtattgaatccaagtccatggcggatatgtcattgatcacggtagaattggagagtacggtgagtccggacgagctggagcagaaatgggatatcttgcgtcggaaggtgacgaatgcacaggcccaaatgccggatggaacgcgcccttccgtggtaatggatgatttcggggacgtgtatggaatgttttatgccataacgacagacggggtgggagacgagcagttgctggattatgcccagttggtgaaacgggagttgcaggatattgagggggtgcgtcgagttgaaatttacggaaatcggaccccatgtatcaatatcgagatgatgcaggataagatggcgaatttgggggttcatccgatggaggtgttgtccacgttgaacagtcagaataaaaccgtgtatcccggttatttcaatagcggggatcagcgtttgcgggtggctattaatgatagttacaggtcgatagatgatattaagaatttaattatacagggacacgaggatgatcagttgcgtttgcgagacattgcgtctattacggaagggtatgaagatccggcccgtaacggaatgaagtatgatggcaagcaggctttcgggttggcgatttccatggaaaaaggtgggaatattataaccttgggagagaaggtagaccaagagttacagcagttgaaagaatcccggattccagtgggagtggattttcagaaagtattttttcagccggatcgagtaagggaagccattaatgttttcatggttaatctggtagaatcggtagtgatcgtgattcttgtgctgatgcttaccatgggatttcggagcggggtgattatcggaaccggactggtgattatcgtactgggctcattcgtggtgctttatctttttgacgggaccttgcaacgggtttcactgggttcgttgattgttgccatggggatgctggtggataatgcgatcgtgattgttgatgggatactggttgatttggagcggggcgtgaaacgtccagctgcgctgacaaatatagcgaaaaagacggccatgcctttattgggggcgacattgattgctatcttggcgtttttcccgatctttatttccccggatacgacgggcgagtacgtgcgggatttgtttatcgtgctggcggtatccctgttgttgagttgggtgttggcgttgacgcatatcccgattcacgcggatcactcgttgaaagtgaagccgaagaaggcgaatgagaatttgtatgatagtaagatataccggttgttccggcagttcctttcttttatgttgtggcataagtccatggcaatcggggtggtcgtggttttattggcgattaccgcatttttgtaccggtatatcccacagggtttcttcccggatttgagttacacgcagttgtatattgaatttaagatgccggaaggtacgcgggtggaacgggtagaatcggatttggcaagtatagaggattatttgttgagccgcccggaggtgactcatgtgacgacgagtgtcggcgggacgcctgcccgttataatctggtgcgttctatcgcggaacccacgatgagttacggggagttgatcgtggattacacgaccccggaagagttgaaagcgtcgatgaccgagattcaggattacctgacagctcattacccggatgcttacgtgcggatgaaacgttataatctgatgtacaagaagtacccgatcgagttgatgttcacggggccggacccggccgtgttgagagagttgactgcaaaggcggaacagattatgcgtgacgaacctgcaattactttggtgacgaatgactgggagccgatgactcccacgttgatggtggattactaccagccgattgcccgttccgtgggactttcccgttcggatgtcggtttgtcgatgcttgccgccacggatggaatgcccgtgggatctttctacgagggagttcatgcaaagcctttgtacatgaagagcgtgaatagtgagggggagaaggtggaagcacttgataatattcccgtttggagtgtgctgccttcgacggcggctttgaacgaggagtcgttgaaggggttgttgatgggaacgatgtccggggaggatttgctggctcaaagtataggttctatcccgttgaatcaagccacgaaaggtatttacttgaaatgggaagatcctgttgtgcgacgttataacgggcagcgggctatgcgagcccagtgtaataatgctttgggatacacggcggagagtgcccgttcgctgatcacggagaaggtggatacgattactttgcccgaaggatatgctaaacagtggttgggagagcataaggcgagcggggagtccatgaaatatttgttcgggaatattccgttagcagttattctgatgattgctatactgatcatgttgttcaaggatttccgcaagccgattattattttctgttgtttacctttggctgcaatcgggatcgtgctgggtatgttgatcagtggtaaagagtttggtttcgtggcgattgtcggtgcattggggttggtcgggatgatgattaagaacggagtggtactactagatgagatcgggttacagattgcttccgggaaagatcagacacaggctctgctggattcttcttcttctcgtttccgtccggtgatgatggcgtcattgacaacgatattggggatgattccgttgctgggtgacgatatgtttggctcgatggccgttacgattatgggaggcttgttggtaggtacggtgatcacgttggtgtttattcccgtgttgtacgcgatattctttaaagagaagaaaagtgatagtataagttag

SEQ ID NO: 2105 - DNA, 3051 bp, unclassified Butyricimonas
gtggaagaagtcgtaaataagtctattcaggtaattggtttcacgagaaatgccgattttcaattacccgttttaaatgccaataaagaattattgcaggagaatatcatcctgctgcgggttggttgtcagcatgaagagtttctaaacgtgttacaagaggtacaggccgaggatataatgcttgtcgatctggatcgggtggccctgcccgtgttgaacgctcttgggcaagcttacggaaaaacggaacgaaaggatcatgtttattacgtgagtaaccggaaacgtaagctgtggcttgggtttgtggatgcagtcctgtggcgaggtgatcggagtattacggattctcctgtgttgatcggtaacaagtctttgttcatgaaggcttacgccggggatgacttggacggaaatctattgcgggctgtgagttacagtttacagaaagctttcgtgaaattcgggaccttggaggtgcctgttacttggaaagattcggaaaacgtttcgaaccctgccgtgaattatttttggaagataccttttcgttttttgaccacaggccgtttctttaccaccttgtttgatgtttccggtcggtctcgtcgggatatgacattccgaatgcttatgctgttattcggtttgttcgtctttttttacatgccttatatcagcaaggattacgggattagcggggacgagtttgtcgatcaccggcattccggttatgtgcttgatttcttcacgaaaggagataaggccgcgttgaatcagccgaaaacggctttacatctttacggtaattcgatgcaggtcgtggcggccgttgtggctaacgtgatcggtgcggatgatgtctatgccgtgcgccatgtcgtgtgtgccttggtgggagctttgggggtaattgcgatcggtctgttgggaatgcgtttcgggggagggttgtgtggactgatttccatgttgttactctttttttcgcctcgtttcttcgggcatagtatgaataacctgaaggacattccgtttgccgtgggatacttggttgccatattctacttcgtgcggatgttcgatcgttatcccgtggtcaaactacgacacatgatcggggccatgctgggaatcgctttggcactgggaacccgttccgggggcttgcttttgttcccgtacttgttgatgtatggcggtttgttttacatcttgtgggtcggatttaaggagttttataaatttatgaaatatcgtaaggaagtcgaaaacattctgtttttgattatactcgttttatttgttgggtatttcttgtctatcatcacgtggcctttcgcgttggctcgcccgtttactaacgtggttgtgtcgttaaaggaattcacgaattataatatcgggttgcgcacgatattcgagggcgaacagatgatgtcgaatatgttgcctgtccattacgccccgaaatacctgatgattgggtctcccttagtggtggtggtcggttttatcggttacctctttttcatggtttttcggaagaaggaattctctctgttgtcgttcttcattttattctcactggtatttcccgtgttttgggttatttaccagaaatcaaatttgtacgggggaattcgtcatttgttgttcgtgatgcctttcatggtgttgctggcagcccggttctggacgttaatgttatctgtttcccctaaatatttgaaggggatcatggtcgttgtgtttgtcgggttgttattcctgcctgcacgtcacatggccgtgaatcatcccaatgactatgtttattttaacgagttggtgggaggattgcgaggtgcttacggggattacgaaacagactattattataattccttgaagaaaggggtggattggttcaagaagaacgtggattataagggacgtcctctccggatcgtgacgaatcatagtgcgaatctgcaacattatttccggaaagatacgaatgtaaccatcgtgtatagccgatattacgataaattcagcaaggagtgggattacatgatattcgataacgtgtatatcaatagtttccagttgaaaaatggtcttttcccggtgaaagagggctttttatactcggtggatgccgatgggttgccgatgtgcgtggtgggtgagagaacgtctagggatgattacgaggcgatcaagttggaggaacagaagaagtacccggaggcgatcgcgaaattggagaattatttgaaagatcacccgtggaacgaggaaatgtggatgcgtttatcccggatgtactacacgattggcaaaccggaagaggctcttcggtgtacgggtgaatctctgaaatggcaaccgcagttgatggatgcgttgaatatccgggcgttgagtgctttggatttgaaaaagttcgcgacggctcatcaggcggttgatgcgatgttggcccaaaatgacgtggcgtcctcgtcttattatctgaaggggttgatttactacacggagggaaaggataaggaggcgttggactatgtcaataaagcgttgaggtataacggtggaaacgtgcaggcgttggccttgggtggggatattctacggcgaaacgggagttattcgaaagcgatagaaccttacgagaaggtggtgagagccaaacgggcggatgagcgggtgttgctttctttggcggaatgttactgtcgtgtgaataactacaagttactggaacaggtctcgtcattgttacacgagcaaggacgggataaagaggcgttgcagaagattgaactccgggctttgattcagcaaaaacgcatggaagatgccgagaaattgttgaaacagatgaacggggtcaaggaggatagcgagtttgtattgttacgtgcgctatgtgaacttgccgcgggacgccgggctactgccactgaaatggctcaaaaggcggtggaactggacccgaagaacagggaggcgattgaattacagcgtttcttgtcgaaagaaatggagattcggaaataa

SEQ ID NO: 2106 - DNA, 3297 bp, unclassified Butyricimonas
atgacatttgaaaatatacgtttggtggcccgttacgagcgaaacctgatcataagaaataagttgttttggatattcgcttgttgtgtagttgcgggaatttctctttcgcactggctatggcaaagcgactcattaggtgggcttaggtggttaaacagggctttgccttcgtttattcctttttggaatgcttggttttataatttggtgcaagggattatcgtgatttttatcggtatcgatttcgtgtggcgggatcgacgtttggagacaaatgccgtgttctctgcccgtccggtgactaatttggcttatcaaacgggaaaggtgttggggatcgtggaggtttgcctcgtgctgaacttgataacgatgggattagggatgattttccatatcttgttcggggaaccgggaactttccagttgaagatttattttgtttacctgttcgtgatgaccttgcccacgctgtttttcgtgttgggagtcgctttaatcgtggctaaccgggtaaagaatcatgccttggcagtattggtattattggctgtatttgctgccttttatttcgggaccacggatttattgtggggtatcgttgacccgtgggggcgtgcattgccacttttgttctcggatgtgacaggaatgacccgtccggagtgggttgttttacaacggggaatgtttgtttttctggggttgggatttgttgtgctggctatggggatgatgccgcgtttgtcggaacgggcaggtgttacgtggaaagtgagggccgggggatggacattcctgctgatcggtatcttgttcggaggggtttattacggtatatttcacgagatgaataatcgaagaaacttgtaccgggaggtattcgaaaagtacgccgaagtgaaagggggacacgttaaggcacataatatctattttcgtcaggaaggggataaaataacgggggagagtgatctggtggtggcaaacgtgggaggacgacccttagttcgcccggtgctttatttgaatccgggattaaaggtaacggccttgacaggcgggcaaggggagaacttgccttatacccgggaatcccaagccatccttttggagagagcgttacaacccggtgaagaaatccttttacacgtggtttacgagggaaagattgatgaggcgatttgtttcccggatttcacggacgaggagtttcatgatacccgcttgatgagctttttccggacgtatcattcgatgttccgtcatgggaggtgttttgctcgtgtcggggatgattacacgttgcttttcccggaatgtttgtggtatccggttgccgttcccccggtaaacgtgaacgccccgttggctcgtcagtatgattttacccgttatcgattaaaagtcggggatgtcgggaaacgagtggctatctcgcaaggagagatggagatgagcggggatactacggtctttagaaaccgggagccattgccttctctaagtctgactatcggggagtacgaacggaggagtatcgtgttggattccttgacgttcgagttgtatcattttcccggacatgactttttcatgcgggattacacgagtctgaaagattctgccgacttccttgtggaagagccgataagtacaatactagcgataaaagggggtgattatccgtttgacaaattgaccgtggtagaggctccggtgaatttcgttcctcgtctatataaaggatttgcgggaagtcaatttgtacagccggaactcttgttttatccggagcggatgtatttggggtattatgcgcacgtgggattctggccgggagatgatgatgaaaggacacgttttgagttagaggtggatgcatttcgtaatatgttggaggtaaacctgctcacgggtatttttgattgttcggctttgttcggtgatttcggtggggttctgcaatcggatgaatacccgggttttggtggtatcgtgaacgatttggccaaggttgacttttctaacgggccgatgatttacttgggggatgagctgggctattccgaaatcgttacttattggaatggaaaatccatgcgagaagctttcgtggacaaggagacgaaaggcaatcagttgcaggagttactaaagagaaaatataccttgatagagaaacatttgcaggcactggtcggggaaagggaattattccaatttatgaaacaattcaagcaacgttatttgtttatggctcctgatttcgaggtgcttgagcgggagtttaacgctcgttttcacgtgaatcttcgggagatactggattattattacgaggggaaagagttaccggcattgtttgttcaagatttgaaagtggagttgtatgaagaggacgaggaagctaggcatatcggtagctgtaaaatatataatcctacttccgcgccggcagtcgtgacgttgagcgtggcgacgtattccatgggaaataacgagatggcatccgggcgacgtagctatttaatcccgggacatagttgtaaggagattcgggccgatctcggtacgcttgaggctttttcattggagatgagcctaagccagaatcttcccggtgagcgtttattggaatggacttcatcaaaagacttgacacgaacgaaagatgggaaaacgggtatttgggatgtggatagcaccatttttacccggaaggttccgggaatgatcgtgaatgccgaggaccccggttttgtgattcatgagaaaaagcggaaagggaaattggccgcttatttctcaacaggtgagaacgggaaaaagtatagttacgtgtatgaccacgagcattggactttgaccacggatagccattgttacggggatatcgtgaagagtgcttattataaaattgccggaacagggaaatctaaggtggagtggaaagtgaacgtggaaaatcccgggaagtacgaggttttggtttatgttccggacgtggaggcgacttcagcccgtaaggtttttatcgggggagcgagacttttttatcaggtgacatccgcgggggacgtcacggacgtggaagtgttgttggataacgaggaaccgggatggatctctttggggaaatattattttgatcgtggtgagtatagcgtgtttttgagtgaccggggtggtgattctttgacgtgggagaatgatggcacttacgcgtgggaacgtgacgccgtgcagttgatttttgccaatgccgtgaaatggattcccgttaatgaatag

SEQ ID NO: 2107 - DNA, 2289 bp, unclassified Butyricimonas
atgagaaatttgtttattgtaatgtgtttacttgcctctgttggcttacaggcacagaccataaaagggcgtgttatggaagaaacggaaaacggaggggtggcgttacccggggcgaatgtctattgggtagggacctcgaaaggatctgtttcggatgcgaacggggaatttaagatcaagtgggaaaaggttgggaagttggtcgttagttttatcgggtaccgctcggatacgatagagggaaaatccacggataaattcgtgacctgcacgttgaaatccggggagcaattggatgaggtgagcgtggctgcccgtaaacagagtaccgtgatgtcgactcagggacctttgatcgagcaattgatcacgggcgaagagttgtgtaaggcggcttgctgtaacttgggtgagagtttcgagacgaatgcctcggttgacgtgtcgtatgccgatgccgtgacgggtgcaaagcaaatccagctattgggattaaccggaaagtacgtgcagatgatgacagagaatatgcctaatttccggggattggcctctttgtacggattgacttatattcccggtccttggatgtccgcgatttccgtttcaaaaggaacgggatcggtgattaatggttacgaatcgatggccgggcagatcagcgtggactacaagaaaccccgggacccggagttactctcggctaatgtcttcacgagtagcgaggggatgtacgaatttaactctaatttcagtatcaagttcaatgacaagtggagtacgatgttccttttgcatggggactggatggaagagcctcatgacgggaacaaggatggattcttggatatgccggagaaaacgcaatacaacgtgatgaatcgttgggcttataaagatgatacttggtatttgcaattcgggggtaaatttatcgacgaggaacgtatcggtggacaaaccactcatggtggacatgctcatgcagatgagaaatacgggttgtataaaattggaatcgacactcgtcgttacgaggctttcttgaagttaggttacttgatgccccggtatgagaacacgagtatggcgattttggtgaactattccgatcacacgcaggattcttattatgggccgaaaatgtataacgccgggcagaagagtttgttcgtgaactacatctaccagtctatcttcgggacgaatcccagccagatgtactctgccgggttgagtttcaattacgacaaatatgacgaagatttccgtgatccggttttcaattatggagaggatatttctaccgatttcataaatatgaaacgagaagaacgggtgccgggagctttcttccagtacacgggagagttcttggatcagcgttttatcgtgatggcaggtttgcgctacgattatcacaatattttcgggagtatttggactccgcgggctcacatcatgtataaaccggatgaattcaccagcattaaggccacttttggtcgcggtctgcgtactccgaatatcttggccgagaacagttacttgctggcctctgccgcgaacttctacgtgaatggcgagttgttgggtaaaaatccggctttactggatgatctaaaaatggaggattcttggaatttcggggctaacgtgaaccggaagttcgaagtattcgggcgtaccttgaatatcaatttggattattatcatacgaaattcaacgaccaagtggtggtggataacgagacggcatacaacaaggtgaacttttataacttagacggggattcctattcgaattgttaccagatagaggtgaaatacgagttgatccctcgtttggaggccacgttagcttatcgttacaatgatgtgaagacaacgataaacggtgatttgagacgtactcctttaacgagccgttataagggattggtgaatttgtcatatttcacgaatttgaagaaatggcagttcgatttcacaacccagttcaacggttctggacgtttgccggagcagggtgggattgccgatgaatatcgggtcgcctcccgttttgatgatttccagatcatgaacgcgcaggttacgaaatatttccgtttgtggagtatttacgctggatgtgagaatatcggggatttcactcaaaagaacccgatcgtaaattcccataatccttggagcgatacctttgactcgtcgaaagtgtggggacctcttcacggacgtaaattttatatcggtttgagatttgccttagatcgaaaagaataa

SEQ ID NO: 2108 - DNA, 1344 bp, unclassified Butyricimonas
atggacatagtcatagcgggagcaggagaagtggggacacatctcgcgaatatgcttagcaagcaagaacataatatcatgctgattgacagcgatgaagaaaaattggaattactgggtaatcaattggatgttatgtcaattgtgggatcttgtacctcaattggtgcattgaaagatgcaggagtacacaagtgtgatttgtttattgcagtcaatcaccaagaagatcaaaatatcaattcagcgatcttggctaaaaaactcggggccaaacaaaccattgcccgggtaaacaatagtgaatatttggaagacgagaacaaagagtacttgaaaatgatcggtattgattcgctgatttacccggaacgattggctgcggaagaaattgtagcctccttaaaacagagtggttcaaggcagttacacgaattctctgatggccgcctgcaattattaggaatcaaactttgggagaatgccccggtactcaacttaaccttgataaaaatggcagaacgttacggtgcccagcatttccgcgtcgtggctatcaaacgagcagaccacactattatcccgcgagggaatgactctttccgctatggagacttggtatttattgtaaccaagcctttctacgtccccaatgtattcgctctttgtggcaaatcacaatatgaagttaagaatgttgttatcgtgggaggttctcgtatcggtatcaaaacagcttccctgttagagaaaaattacaacgtgaagatcatcgaaaaggatcgggagaaatgtattctcatcgccgacaaattaaaatccacgctggtaatcaatggtgacggaagagatttggccttattacgagaagaggggataaaaaacacggatgcctttatcagtgtaacccactcgtccgaaaccaacattctgtcctgcttgttagctaaaaagctcggggtaaaaaagagtgtggctgaagtcgagaatatcgactacattgatctggcagaaaacatcggtattggcactctcgtgaacacgaaattaattgcagcctctcatatttatcgttacacgatgaacgtggatgtaaagcatttgaaattcctcacgttctcggaagctgaggttttcgaagttacagcagaaccgggttccaagatcacccgtaaaactttggcagatatgaattttccggagaatgcaactgtcgggggtgttatccgtaacggggatgccattatagctaaaggagacgtacagatcgaggcaggagacaaggtagtcattttcgccttacctagtgccgtgaagaaagtaatcaaattgtttcaaaaatga

SEQ ID NO: 2109 - DNA, 3090 bp, unclassified Butyricimonas
atgaacagcattaccaaatttgcagtaaaataccccgtgagcgtgttaatgctcacgctggcagtatgtttactgggaaccatatcttataataaattagggacagaccttttccctgacctgaaaaatcccgctctttacgtggaagtgaaaagcggtcagagaccacccgaagaggttgaaaaactgatcacgacgaacgttgagtctacggccgctcgtcaagaaggcgtgaagagcgtgtacagtgtcacgaaagtcggctacacgaaagtgaccgtagaatacggatgggatcaagacatggatgccgctttcttggatttgcagcgaagtgtctcttctctttctcaagatgaaaccatagaagaagttaacgttacccgttatgatgccaacgcgacaccgatcatgaccatcgccctcactcataacgaagtgaaggacatgaacgaattgcggaagatcgcggaaaattacatgcgcaatgaactcgtccgggtagacggtattgcggatattcagttgaacggacaggaacaggcgatcgtcgaaatttccacgaatccctacatgctggaggcattcgggttaactgccgacggaattgcctcgcaaatcacggccatcaatcaaaatgtttccgggggaacgatcacggacggagatattcaatacacggtgaaaggggtaaacctgattaccagtctccaagatattgaaaacattatcgtggcatttaaagagaattcttccagcggaagttcctcttccacggaatctacaagcagttccagtaagacaaaagccccggtatatttgaaagatgtggcctccgtgtccattcgcaacaaagacccggaaaacttggcccgttacaacggggaacgctgtctggggatcagtatctacaaagaaaataaatataacacggtaaatgccgtggaaaacttgctagccaagattgatgaattccgcaaaagtttaccggggtatgatttccatatcatcagtaaccaaggagaatttatcgggagttccatcaacgaggttaaagattccgctttaatgggtatcatcctcgccgttattatactttatatattcttgcgacgagtgaacatgacattaatcgtcagtctctctatcccaatctcgatcattgccacgttcaacctgatgtacttcaatggtctttccattaatatcatgacgctgggaggacttgcgctgggtgcgggaatgttggtcgataatgccatcgtggtgatggaaaatatcttccgaaacatggacgagaacaacctatcacccacggaggcagccgtgagggggacttcggaagtagcgggagcaatcacggcttccaccttaaccacgatcgtagtattccttccaatcgtgtacctgcaaggtgccgccggggagctgttcaaggaacaggcgtggacggttagtttctcgctgttatcctccctttttgtttctatcctgtttatcccgatgctggcatcgaaattcatgcggaagaaagacaacatttccagtcacgccatcacgatcaaaggtttcggaaatttcgtcgggaaagtccttaaaaggaaatacttggtgattggcatcgccacagctctcatgatcgtttcttacttgatgttaccgttaatcggcatggagttcatgcctaaaacagaatcgaaggagttctcaattcttgttaccatggaaccgggaacaaggttaaaaagtacggataatgccgtgggaaccattgaagatgccatccggactctaggacaggatgatattgaatggcaatacacactggttggcccttccaaccttgaaagtcaaagcgggggtaagttggaatcagaaaatcaatcccaaatcaaggtaaagataaagaaagattccaagttggatgctgattactttatcacgaatattaacgagaattaccccttgccggaaggtgtggaaatctcctacgagaaaggggaatctgccctacaaagcatcctaggaacagaaggcgcaccactggtaatcgaggtgaaaggggaagaacttgaattgctggatgaattgtgtaccgagataaaagagaagattaccggaatccccggtatatacgatatcaaatcttccttggagaaaggagccccggaggtgaatatcaagattgaccgcttgaaaagtggaatctacgggatcgatgttgccacggtaagtaaccaagtcagcgagaaactggcaggtaaggatgccggaactttcgaaacacaaggcgagactattgacatcaatatcaaggttcccgaagtgaccctttccgaaatttacgatattgaaatcatacaaggcgagaagaaatatcgtctcggagaaattgcagacatcgaaatcacgtcagccccgaaagaaattaaccgggttaaccaaagccggacgggtatcgtgaccgccatgatcgagaaacaatactcactaagccatattacccctgctattaaagctaaattgtccgaggttgaattcccggccaagtattcggctaaaataacgggagaggaagagatgcgacaagagtcattcagcgggttgggattcgccctgtttttatctattctattagtatatatggtaatggcggcacaatttgaatctttgcgccacccgttcacgatcctgctgactattccgttagccggcgtgggatgtattttggcattcctgctcaccggacaaacactcaacatgatggcctttatcggtattattatgctggcaggtattgccgtgaacagttctatcatactcgtggacgcgatcaatcgtctgaaagaagagggacacccgttggaagaggctatcaaaatggcggcacagcatcgtgtgcgtccgatcatcatgaccagtgccaccacgattctggcattgctacccatgtgtttcggattcggggaaggagcctcattgcgctcgcccatggcacttgccgtgatcggtggtttactgacctcaaccatcatgacgctgatcgttattccgtgtgtgtattacgttattgacagaaagaaatcatga

SEQ ID NO: 2110 - DNA, 1632 bp, unclassified Butyricimonas
atgagaaaactattcctacttctatctttaggtgttttcttgttctcttgtaaagaggccaagaaagaaacgaagccaagcccctaccaagcgcttgcagatcagtatgctgaattcccgttaacaacggatttgagccaattgaccgacaacgagaagaaaatgattcccatacttatcgaagtcgccgatataatggaaaacattttctggcaaaacgcttatggagataagagtgcattgatggcacaattcgctcaggattctgccgctctgaaatatctttccataaactatggtccttgggatagattaaacgacaacaaacctttcatcgacggcgtgggagcaaaacctcttggagcaaacttctacccggctgacatgacgaaagaagaattcgacgcgctggatgatcctcgcaaaacggactggtatagcgttatccgtcgggatgcagtcggaaagcttatcgtgctttcattccacgaagcttacccggaagaagtggcaaaagcatccaaattactggaagaagctgccgcactagctgaagacccgggattgaaaaactacttggcattaagagcaaaagcccttctggatgatgattacctagccagtgatttagcatggatggacatgcagaacaacacgttggatttcgtggttggtcccatcgagacttacgaagatcaactctacgggtataaagcttctcactccggacaaatcctcgtgaaagataaagagtggagtaaacgcttgtctgaatacgctcaatacttgcccaaattacaggaaaatttaccggttcctgccaaatacaaaaaggaaaaagcaaatgctaacccagacatgaacgcttacgacgtgatttattacgccggagattgcaatgccggaagtaaaaatatcgctatcaacctgccgaacgacccgagagtacacgcggcgaaaggaagtcgtaaactacaattgaaaaactccatgcaggccaaattcgagaaaatggttgtgccgatttccaaattgttaattacgcccgatcaacaaaaacatattagttttgatgctttcttcgaaaacgtgatgttccacgaagtcgctcacgggctaggaattaaatacacgctgaatggcaaacaagacgttcgttccgccctgcaaaactactacacctctatcgaggaaggtaaagcggacatccttgggttattctgcgtgaccaaacttgcagaatggggtgtattggaaaacaaagacctcatggataattacgtgacttttatcgccggaatcttccgttccgttcgtttcggtgctgccagcgcccacggaaaagctaacatgatgcaattcgcccatttcatggaaagcggagctatcagcaaagatgaaaccacgggatactacaccgtagatttcgaaaagatgaaaaaagacatcgaagtgattgccggagaatatatcacgatcgaaggagacggagacatccaaaaagcgactaaattggttgcagaaaagggtatcgttcccccgaccttacagaaagacttagatcgtatcgcgggagctaacatcccgaaggatattttcttcaaacaaggaaccaaagttctagggttataa

SEQ ID NO: 2111 - DNA, 3549 bp, unclassified Butyricimonas
atgtttaaaaaaatggcaaaagaaaagaaatttatcacatgtgatggtaatgcggccgctgctcatgtagcttacatgttcagcgaggtatcgtgtatctatcctattactccgtcgtctccgatggctgagtatgtagacgaatgggctgctaaaggtagaaagaacctgttcggggagacagtaagagtgatggaaatgcaatcagaggcaggtgctgccggagctgttcacggttctttgcaagctggtgcgttaaccacgacttatacggcctctcagggattattattgatgattcctaatatgtataagattgcaggagagttacttccttgcgtgttccacgtgagtgctcgtgctttggctgctcatgcactttctatttttggtgatcatgcagacgtttacgctgcccgtcaaactggttttgctatgttggcttccggttctgtacaggaagtaatggatctttctgctgtatcacacttgacggctatcaagtcaagagttcctttcgttaatttctttgacggtttccgtacttctcacgagatccagaagatcgaagagttggatatggaagatattcgtggcttggttgacatgaaggctttgcaggagttccgtgatcgggctcagaattctgagaaccctgtaacaaagggaaccgctcaaaatccggatgtgtatttccaggggagagaggcggctaacaagttctacgatgcagttcctgatattgtggctggttatatggatgaaatgtccaagattaccggtcgtacctatcgtccgttcgtttattacggagctaaagatgccgagaatatcattatcgctatgggttctgtaaccgagactatccgtgaggtgatcgattacaagcttgctaatggcgagaaagtgggtatgatcgctgttcatttgtatcgtccgttctctgctaaatatttcatggaagctgttcctgctacggtaaaacgtattgcagtgcttgaccgtacgaaagagccgggtgcaaacggagatccgttgtatcttgacgtgaaagacgtgttctatggtcagaagaatgccccgatgatcgttggcggacgttatggattaggttctaaggatgtaactccgggacaaatcattgctgtttacaagaatttggctatgaacgagccgaagaaccaattcactcttggtatcgtggatgatgtaactttccgttctcttcctattgaaccggaagtaaaagtgaactcagaccacatgtatgaggctaagttctacggattaggttctgacggtactgtaggtgctaataaaaactctatcaagattatcggtggagctaccaataaatattgccaagcttatttcgcttatgactctaagaaatcaggaggttttacggcttctcaccttcgtttcggggatgatcctattcgttcaacctatttggtaactactcctgacttcgtggcttgtcacgtgcctgcatacattcacatgtatgatgtattgaaaggtttgaagaaaggtggttctttcttgttaaactctctttgggatgaaaaagaggtgggagagcatcttccgaatgcaatgaaacgttatttggctgaaaacgaaattaatttctatattatcaacggaacgaagatcggtcaacaattaggtttgggtaaccgtacgaacacgatcatgcagtctgcattctttaaaatcacgaacgtgattccttacgatttggctgttagtgagatgaaaaaagctatcgacaagtcatacggaaagaagggtgaggctattgtgaagatgaactatgctgctgttgatgcgggtggtttggctgaaaacgtagtgaaagttactgttcctgctgaatgggcaaacttgaaagacgaagtatgtgtttgtgacgaaaaccgtccggaatttatccgtaacgtggttgacgtgatgaacgcacaaaaaggggatgatcttcctgttagtgcatttgctggacgtgaagacggaactttccctgctggaacttctaagttcgaaaaacgcggaatcgctattaatgttccggaatggcaagtgaataattgtattcaatgtaatcaatgtgcttacgtttgtcctcacgctgctattcgtccgttcttgatttctgacgctgaattagctgccgctcctgccggaacagaaaccaagccggctattggtaaggaacttgcaggattgaagtttaagattcaagtatctccgttagattgtacgggttgtggtaactgtgccgatgtttgtccggctaaggagaaagcattggtaatgaaaccgcttgaatctcaagaatctgaaatcgctcgtttcgaatacatggataaaaaggttggctacaagaaagtagttgagccgaataacgtgaaaaattctcagttccaacaacctttgttcgagttctccggagcttgtgccggttgtggtgagactccgtatattaaattaattactcaattgttcggagagagaatgatggtggctaatgctaccggatgtacctcaatctatggaggttcagctccttcaactccgtattgcaagaattatcaatcaggacgtggtgtagcttgggctaattcattgttcgaggataatgccgagtatggtcttggaatggcagagggtaataaccgtttgcgtgaccgtgctaagagattgttggaagagaacttgtcaagtttctctgccgaaactcaggctgctgttaacgaatggcttgctgctttcgaggatggagagaagactttagctgtcagcgacaatatgtctgctgcgttagctaaagaaaattcagctatcgctaaagagattttagaattgaaggcttacttcacgaagaaatctcaatggatcttcggtggtgacggatgggcatacgacatcggttacggcggtttggatcacgtgttagcaagcggtcataacgtgaatgtattggtggttgataccgaggtatattcaaatactggaggtcaatcttctaaatcaactcctgttggtgccgtggctaaatttgctgccagcggtaaacgtgttcgcaagaaggatttgggtgcaatggcaatgtcttatggttatgtgtatgttgcacaagttgctatgggatctaaccaagctcaatatttgaaagctttgaaagaggcagaggcatatgacggaccttcattgatcatcgcttacgctccgtgtatcaaccacggtctgaaagcaagcatgggtaaatctcaagctgaagagaagaaggctgttgaatgcggatactggcaattataccgttataacccggcattggaagaagagggtaagaacccgttccaattggattctaaggagccggattatagcaaattccgtgactatctgatgggtgaagttcgtttcaactccttgttgaaggctgctccggaagaagctgagcaattgtttgccaagactcagtctgacgctaaatggcgttatgaaggttacaagcgtcgtgcagaaatgaaatacggcgagtaa

SEQ ID NO: 2112 - DNA, 1659 bp, unclassified Butyricimonas
atgtggagggggattggagcattgttgttgatgttacttcttttatcatcaaatgtttgcgcacaaacagacacgttgctttacccgttgaaaaatgttccgctattgagtggaaatttcggagaattgagagcgacacacctgcactccgggctggattttaaaaccggagggcgggaaggtctaccggtgatttgcgtgaaagacggtgtcgtggcacgtgtaaaggtgtctgccacggggtacgggaatgccctgtacttggaacacgaggggggaataaccacggtgtatggtcatttaagccgttttgtaccccgaattgcgaaagtcgtgagaaatatacaatataataaggagtcattcgaggtggacgagaatatgtcgggctatgaactccgttttcgtgcgggtgacacgattgcttatagcgggaataccggctcttcgggtggtcctcatttgcatttcgaggtgcgtgacacgaaaagcgagcgtgctttaaatcctttacgttttctttcggtgaaggatcaaacgggaccgagcgtgcgaggggtttacgtgtatccgatttcaaacgagggggtgcggaatgcaactcgtcgggtggaagtgaaaaacacgggtaaccgggtgttccggggaggaaaggtcggggtacccgccgggatggtcgggattgggatacaatctgatgactatatgaaagattcttggaacaagttgggcgtgtatgacttgagcgtgagtgctaacggacaggaggtctttaaaatgaccatgaacgagctttcttttgacgagacgtttttggttaacgagttgaaggattttcatcattacagggaaaaccgtttggtttacttgactttcgggaactatcaggagcaattgttgtccgttcgtaatcagaacgggggatttatcccggttgagaaagatagcgtggtggatgttacagttgatttatcggacattaatgggaatcgttccagtatcatgttccagttatggggtaaatctccctcgcgggaattggtattgacggacgaggaaaaattattgatgaatcatcaaaacgatagcttgaaacaaggaatatataccctgtggttggaggcggatgctttatcctatccgatcgtgtgcaagccggaggtgtcttcccgcttgagagatagtgtcgagacgatcgaggtgttttctaccgggaaacaaatatacccgttgatgaaaaatgcccggttggtggttggcgggaagttcccggaaaagtccgtgatctgtttgctggagaaaagtaatcgtttttctgccttgaagacccgatggacggaagaggggcttgaggcatttccccgggtgttgggtgaatacacggttcgtcaggacacgattgccccggttgttctttacacggggagggccgggcagaagatccgcttcaagatggttgatgatttgtcgggcatctcttcttatcgggttgaggtaaatggaaaatggtgtttgttcacgtatgacgcgaaaaatcgcctgctggaaggtaacataaatgaacccgttttcgtgaaaggaaaaaacaggcttgtcttgaaggtggaggatgccgtgaaaaatattgctacctttgagacggatatttataaaaagtag

SEQ ID NO: 2113 - DNA, 1452 bp, unclassified Butyricimonas
atgggagtttttgaaggattaaaaccagaagcagtttggggatattttgaagaaatatgtcaggttcccagaccgtcaaagaaagaaggtaaaattatcgcttatttattggattgggcgaagaaacacaatctggaggcgaaacgggatgatgcaggtaacgtgttgattaaaaagcctgcgaccaaaggaaaagagaatgcaccgaccgtgattttgcaggctcacatggatatggtttgtgagaagaattcagatacggtacatgattttgataaagacccgatacaaccctacgtggatggagaatgggtacgtgctaaaggaacaactcttggagctgatgatgggattggtatggcagctcagatggccgtgttaacttctaccgacattgcgcacggaccgatcgaatgtttgtttaccgtggatgaagagaccgggttaacgggtgcttttgccctgcaaccgggattcctgagcggaaatatacttttgaatttggactcggaggatgaaggagagatgtttatcggttgtgccggaggtatcgacaccgtgattaacatggggtataagaccgagaaaactccggcagaatcatttgccgtgaaggtacaggtgaaagggcttcaaggaggacattccggtgatgatattaataaaggtaggggaaatgccatcaagattctgaaccgtttcttgtgggatttgaatgcaaaatacggaattcgtgtttccgtgtttgaaggaggtaatctgcggaatgctatcgcccgtgaatcttttgcggtgatcacgttccccgagcagtacaaggaaaacgtgagggtagactttaatatatatagtgcggaaatggaaaacgtgtggaaaatcacggaacccggtttgcagttagcattagagtctacggatgtgccggaaaacgtgttgacaaaagaaagtacggatgcacttgtaaacgcattgtacgcttgtcctcacggggttttctccatgagttaccgtatgccgggattggttgaaacatcaacaaatctggctgcagtcagattcaacgaacccaataatatcttgatcaccacttcacaacggagtgacgtgaattcggaaaaattcaatattgccaacatggtagaatccgtgttcacgctggcaggagccaaggttgagcatggagaagggtacccggggtgggctccgaatccggattccccggtagtaaaagttgccgtggattcttacaaacgtctgttcggtaacgaaccgatcgtacggtctatccatgccggattggagtgcggtttgttcttggagaaatacccgaacatggacatggtttctttcggaccgacactgagaggtgttcactccccggatgaaaaaatcaatatcaagacggtacagatgtggtggagccacttggtggatatattacaaaacctgtaa

SEQ ID NO: 2114 - DNA, 1878 bp, unclassified Butyricimonas
caagctcattccagtttggaacataactatctacgggatggtttttgggctcaatccatggcggatgagttggttaatcccaagataacagcttctattttagttcggatggaggatgtcacggataaaatcaatgcaggattgaatgccgggatgtctgaaagcgaacgtacgaagaaggtgaatgaaatatgccggatattggaggcggaagctgttaaaggaaccaatctggcggctaatataaagccgtattttaacggaaatcaatattttctttccgtgtttaaaatcttccgggatgttcgtttagtcggggctccgaattctgctatcggtaaatttggaggggatacggataactggacatggccgcgtcacacgggtgatttttccgttttgcgtatttatgcgggaccggacaatgagccggcagctatatcagataagaacgtgccttataaaccggctaaattctttaagatttctgcacggggggtgcaagaaggtgattttactatggttttcggttatcccggaacgacaaacgagtacctgacttcttacgcgatagatcaaattgcttctgttgaagacccgcataagatcaaaatccgcacagcaaaattggcggtaatcaatgccgccatggagtcggatgaattgttgcgtataaaatatgctgctaaagctgcaagtgttgctaatgcttggaaaaaatggcagggagagattaaaggattggatcgtttcagaacggctgataataaaagagttcttgaaaataatttcaacaactgggctaaaagtaatggaaaaaccgagtatatcggtttgacggatcgttacaaagcgttatatgacgctcgtaaagaatatgttctggctgcagcttatgcttcggaggccggattgggaggtgcagaaatcataaaatttgcccgtgaaatagaacaggtattggataactatgacaaatttccggataaggaacagcttaaaacatctttgaaaaattacgttgaggccttctataaagattacgatgtgaccacggatcaacggatattgaccgaaatgttcaagttgtataataatgaggaagtcggagaccaatggataccgtcagtcgttcgtttgagcccgaaatatgctaaactgaacgctcccgatcgttatgctgccgacttgtttaaaaaatcaatattcacgcataaggataatttgctgaaattcatcgacaatttatcagagaaatcaatcacgaaaattgaaaaagatccgattcttggagtagcgaccggaatttacacgttgtacgcggataaaattcgtcccgaattgagccggattgaaaatgaattgaaattattgaatcggttgtggattgccggattgatggagatgcagcccgataaaacattctatccggatgcgaattcaaccttacgtgtagcatatggaaaagttgccggataccatgcaactgacgctgtttattacacgcactacacgacattgaaaggtatcatggaaaaggataatccaaatatctatgattatgatgtaccccagaaattacgggatttgtacaagaatcgggatttcggcccttacactcaagacggggaagttcctgtttgctttatcgcgacgaatcacacgactggcggtaattccggtagtccggttctggatgcagaaggtaatttgatcggtttaaactttgaccgtgcttgggaaggtgtgatgtcagatatgcaatatagcccagagatttgtcggaatattgctgttgatattcgctatgtcctgtttatcattgataaatatgcaggagcgcaaagattgattgacgagatggtaatcattcattaa

SEQ ID NO: 2115 - DNA, 2820 bp, unclassified Butyricimonas
atgataaaaaacatcatctacaccatattactcaccctgatcatcagtcccttggtggctcaggacatcggtacagaccaaacaattccgatggatcccgatatacggatcgggaagttggataacgggctgacctattacattcgtcattccaagaatcctaaaaacaggggagaattttatatcgttcataacgtgggggcaatgcaagaagaggacaaccagaacggcttggcccatttccttgaacacatggcctttaacggaacaaagcatttcccgaagaaaaccatgttggaataccttgccagcatcggtgtacgattcggcaccaacgtgaacgctttcacgtccagaaacgtgacggcatacaatatctccgaagttcccttaattcgggaaacgatcatcgacaccgtgttgttgatgcttcacgattggtccagttacatcacctgcgactcggctgaaatcgaggcagaaagaggagttatccgggaagagtggagaacccgggacatcccccgtatgcgcctgtcggaacaactgaaccccgtgatgtacaaccattcgaagtatgccgaacgtaacgtgatcggtgacataaatatcatcatgaacttcaaacgtcagaccttgttggatttttaccacaaatggtacaggcccgacttgcaggccgtgatcgtgatcggtgattttgacgtgaacatgatggaaaataaaatcaagaaaattctatcaccactacctaaagcacaacatccggtacaaaaagaagtgtattcggtccccgacaaccgggagcctctcgttggcatctcgaccgatccggatgccggtgccatggtagtcagactcatgtataaactggatcttccttccccaagtgaaagacaaacggtgaaggcctacaaaaccgacttggaaagaagctttgtgtcggaattattcaaaaaaagaatcatcaacaaagctgcacaaggcaatccttatatccgtcagggatcagtcaactacacggacttaacgcccgacaaaaagatggtattcatcatgggagccgtgaaagacaataaagtcaatgaagccttgaacgaactggctatcgaagtggaaagaataaaaaagcacgggtttaccccggaggagttcaacgaactacaagccaacatgcttaaatcagttaaactccaaatgaaccagagaaagaatcttaaaagcgtagatatggtgaaagcctgtttggcacatttcaccacaggcaccccaatcccgccgaatgatttcttagaaaagatgtcagtctccacgctacaaaatctgaccttagaggaactgaaccgtacagccctagagatgttctctgatgacaacatactcatcacgatactcggtccccggcgagaaaacatcagttatcccggcgaacatgagttaatcgctaccgtccggaacgccaaaaaccaaaacatcacgccttatgttcaccggactctaaaagacacccggttaatcacgaagacaccgcaatccgggaacattttagaagagaagaagaatgacacgatgggtactgttgaatggactctttcaaacggcgcaaaggtcatcataaaatcatacccgaacaaaaaagacattgttgacatcaaaggattcagcgaaggaggaacctccactctgccggaaaaagaacttgccaatggattcatggccaacaatttctgccaactcatgggagtgaagaatttctcccgggccgatttaaaacaaatcaatgccgggaaagtcatctccctcacgccagaaatcggggagtattacgaaacattgagcgggtatgccgccaaacgagacctagaaaccttgatgcaaatgatccatctttatgtcacggaaccgaactttgaccaacaagagtttaaccatcaaattgaaaaaataaaaagtacactaaataatcgcaagggcctcccaaaagccgagtatagtcaagaagttcaaggcgtgaaatacaaccatcacccgaggaaaacaagcctaacccttgaaaaagtaaacacgatcaccttcgaaaagacaaaacaaatataccaagaacgttttgccaatgccggagacttcacgttcattttcacgggagacattgacttagaaaaattaaaaccactcgtggaaacgtacatcgcctctctaccgacaacaggggtaaagcaggaatacaaagataaccacgtgcgttacgccaagggaaaaatcatccggcatatcgagaaagagttgacaaccgacaaagcttcaatcagtgtgctttacacggcaaaactcccctactccgccgaaaacaaaattctctcggctgccttccgctatattctccgggacagatacatgaaatccatccgtgaggaaaaagggggagcatacagcgtcagcgtgaatgccacggaaaaggctgtcccgacaaaccagatcacgatagaggtgaatttcgacacggcccccttcatggccgacgaaatgctggcgattgtccagaaagaaatcgatgatctcgtcaaaaatggcccctcatcttccgaattggaaaatgcgcaacgttatttcaacaaactttacaagacaaacatttccaccaattcttattggctggaaactttatcagactattaccgatacggaattgacaatttcacgaattacgaaaacacgatgaatggtctaacaccatcagatattcgtaaattcgccaaaaccgtgtttggacagaaaaataaaatggaattcgtattattaccaaaaaaaataacgggatga

SEQ ID NO: 2116 - DNA, 1371 bp, unclassified Butyricimonas
atgaaatatattatactaattatattattcttttcagttatcagtttcagaccttggaattctttcacgaaagaaattcaggttgaaaaagattctattccccaagacacgcttgccgtagcagtacatgatttattcacgaatgaatattctgatctagttgaaaccaagcgtttagatcaaacgattgaacgttttatgaatcagtgggaaataaaaggggcttccctcgcgatcatgaaagatgggaaactgatttatagcaagggatatgggtatgccgacgaagaaaatgaggtgaaaaccgatgtgaaccacatcttccgaattgcctcggtttccaagctaatcacggcggcaggaatcatgaaattaattgaaaacgggattctatccttggatgataaagtatttggcgaggaaggtattttaagcgacacgacactttatgccccgataaaagataaacgggtgaataatatcaccgtggaaaatcttctacgccatcaggggggattcaccaatcgtgcaggagaccccatgttctgcccggtagatatcgcagaaaaaatgaatgttccggcaccagccgacttgaataccatcattaaatttgttttatctcgacgtttaggcttcacaccggggacaagcacatgttattcaaacgtgggttatggaatattatcaagggtaatagaaaaagtttccggaaaaaactacgaagaatttattcaagacagcatactcattcctgccgggtgttacgatatgcacttggcccataatctggataaagaccgatatttcaacgaggtcaggtattacgaacaatcagacgcagacctgatccgttcatgcgatgggcgggacacgctagtatatcgcagtaacgggggaaacaatatcgaggctctttacggtgccggtggctgggtagcttccccgacggaattattacgtttcctttctgccatagacgctgacgattcatatccggatatattgacaaaagaaagcgtggagaccatgacgaaatgtgtgaaaaatgctttgcctcttggttggatgaacacgaacaatcaaggtgattggtggcgttccggtactttggcgggaaccagtgccatgttgaaacgtcaacgggacgggttctgttgggcatttatcacaaacacgagcaattggaccggacctcgttttcctcataagattgaaggtatgatggctcgtgccatggatcgggtaaaagaatggccggacagaaatctgtttgatcctgattactgcaaggctttcgaagacgggaaaaaattgctggccaatgaaaaaggagcccaagcacatcccgtgcatcctgacaatatctaa

SEQ ID NO: 2117 - DNA, 2124 bp, unclassified Butyricimonas
atggatgattgtaacagcgatcatccatttgaaattaaagaggaagttaaaaataaatcgaaatatatgatagcaaaacaattaattgagccaaagagcattgtggttgtgggtggttctgacgacattcataaacccgggggtaccgtgttgcggaatttgcaagacgggaacttcaaaggttcgctttacgtggtgaacccgaagatggatgaagtgcagggaattaaagcgtatcgtgacgtgaaggatcttccggaggtggattgcgctattttagcgattgccgctaaattctgcccgtcaaccgtggaagtgcttgctaaacagaagaacgcgaaagcatttattatcctttctgccgggttccacgaagagaacgaggagggagccaagttggagcgccagattgtggagacgattaattcggtaggtggatcattaatcggaccgaactgtatcggtgtcttgacaaaccattacagtggggtgttcacgagcccgatcccggaactgaacccgcaaggggtggatttgatttccggttctggtgcaacggcattgtttatcatggactccgggatgcaaaaaggaattaaattcaatagcatgtattccgtgggtaattcagctcaattaggtgtagaggagattttggaatacatggacgagtcgtttgatccgaagacgagttctcgtgtgaaattattatacgtggagagcatcgaaaagccggagaagctgttgaagcacgcgtcttctttgattcgcaagggatgccggatcgctgccgttaagtcaggaggttctgcagccggaagtcgtgccgcttcttctcacacgggagctttagccagttcggatgttgccgtggaggctttgttccgcaaggctggtatcgtgcgttgtaacgggcgtgacgagttgatgacggttgcaggaattttcatgcacccggagatgaaaggtcgtaacatggctgtcgtgactcatgccggtggacctgccgttatgttgacggatgctctttctaacggtggaatggatgttccgcatattgaaggcgagaaagcgcaggagttattgacgaaattgtttgccgggtcgtccgtgggtaacccgatcgacttcttggcaacgggtacggctgaacaattaggatatattctggatgcttgtgatcaggattttgacaatattgacgggatggcggttattttcggtagccccggtttgttccccgtgttcgacgtgtacagggtacttgacgagaagatgaagacgagcaagaagccgattttcccgattttcccttcttccaagatcgtgaaggacgagattgcggagttcgtgtctaaaggtcgtgtttatttcccggatgaggtgttgtttggaaatgccttgtgcaagatttacaagactccagccccgcaaccggaacattttgaaatgccggatatggacgtgaagaagatccgtgaggtggtggataacgcgcaaaacggttatttgtctccggacgagattcatactttgttggatgctgccggggtagcgagagctaaagagggagtttctgataacgaggaggagattgttaagatggcaaaagagatcgggttcccgctggtgatgaaagttgttggaccgatccacaaatcggatgttggtggagtcgtgttgaatgtgagcgacgaggagactgttcgtcgtgagttcaagcggatgatgcagatcaaggatacgtacgcgatcatgctggctcaacagttgagcggaacgcaagtgtttatcggtgctaaacgagatgataagttcggtcacatggtactttgcgggttgggaggtatctttatcgaggtgttgaaagacgtgaaggccggattggccccgatgtctaaagacgaggctcatggcatgattaaagagttgaaatcttacaagattatacaaggtgttcgcggacaggaacccgtgaacgaggataagtttgccgaggccgtgatgagaatctctgctttggtgaaggttgccccggaaatcttcgagatggacttgaacccgttgttggggaataaagataacgtggtggctgtagacgctcgtatccgtatcgagaaatag

SEQ ID NO: 2118 - DNA, 3435 bp, unclassified Butyricimonas
atgaaacttacatatataaaactatccgtaacccaaatattatttatcttgttgctcgccttatcgaacaacgtgttcgcacagaataaagaaataaaagtaacgggaacaatatatgacgaaaccggtatcacgctcccttctgttaccgttaccgtgaaagggcaaaaaggcgtgggagtactttccgacaatgacggaaaatttatgatcacggtaccggaaggtagcacgctcatcttttcattcgtgggaatgaaatcacaggaagtagtcgtaaatgccaaacaggttccttacaaaattaccttgaaagaagataccaaggctttggaagaagtagtcgttaccgggtaccagacgctgaaaaaacatgaagttgtcggttcgactttcacggtgaaaggcgatgatatacgtgttgccggagtgaccagtattgatgctgcccttcaaggagttgtccccggagtaagtatcacgattccctcgggaatgatcggaacatcccctcaagtgagagtacgcggaacttccacggtgatcgggaatgcctccccggtatgggttattgacggtatcattcaagaagaccctctcccctttgccggagcacagttaaatgacattcttagttccggagacctcagtagctcaatggcaagtatttccgggagtagtatttccggccttaacccggacgacattgaaagtatcacgttcttgaaggatgcgtcggccacagctatttacggggtaaaggccgccaacggggttatcgtaatcaccacgaaaagaggttccaacacgaacggaagaatcaatgtcaatttcagaacggatatttccctgactcctagaagaacgtatggacagacggaccggatgaattccgccgatcgtattgctttatccaaagaaatcgtggaatccggagtaccttttagccaattccctcaaaatgtcggttacgaaggagcttatctccaactgatgaataaggagatttccatggacgagttcaatgaaaaagtaacccgcatggaaaaacaaaacacggactggttcaaaatcctcgcccgtaacgctgtcagtcagaattattcattaagcctaagcggtggaaatgacaagctcaatttttacggttccgtgggtttcaacaaatcattgagtagctacaagggaaatgaccaaagcaataaaacggtcaacttcagtgtggatgcaaaactacgggataatttacgtactaaatttcaattctctgccagtcaatccgagacgaacgcttactacacgggagtcaacccggaagattatgctctgaataccagccggatattagccccggacgaatggtataccatcaatgaatcaaaagcctacttcgaattggataatggcactgcaattaaaagagatattcgctacaatttcttgaatgaattagaacacaccggaaacgagaataagaatacgaaattccaaattacaggtaacttgatctggaatattacaccggaaatcaagtatgaattaactaccgcatttaccagaaacagttcagaggctaacgtttgggcagatgaccattcttatacagtttcaaaaatccggggagccaattatggagaacttgtaaccggagaatccgactcatggttaaccttggcctccgtgttaccttatggtggtattttgaattacaattcaacaaaccaacaaagctacacggtgcgtaaccaactgaattacggaaaaatacttgatgaagaagggaaccatgccctcaatgttgccttgggacatgaagttcgaggaaacagttacatcggacagagtggcgttgaatacggctacatgcctaacagaggtaaaagcgtggactacaattacagtcaacaagccaacagagattacattttaagcatttatcctgattgtcaatatagagaaacagcgaatgtacctgcatatcaagaccgccactcaatcactctcacggatcagattgaaaactacatgtctttctatgcaacactgggatactcttatgctagcaagtacacgttatctttcagtttcagacaagacgcatccaacaaattcgggcagaacacgaacaatcgctttaaccccgttctatcagccggaatcagatggaatgtaagtgaagagaacttcatgcgccagtttggatggttatccaacttgacgttgaaagcatcctacggatctcaaggaaaagccccggatatcagtccctatctgatcgccaatttcaacattgcaccggacgtattgacgggcgatcaattcctgtcgatcaagaacctcccgaacaaagacctgaaatgggaaaagaccaacagtttcaatggcggtatcgaactctctattctaaacaaccggatatacggaagcattgactactactacaaaaaaacggttgacgctatcacctacgtgaatatacccgtggagaacggaacttcaaacatggcaattaataacggttccatcatcaataaaggttacgacgtatcgttgaccgttatccccgtgcagacaaaaaacatcagatggagtatcagcgcaacttccggctttaaccgtaacgaggtaaaagataacgaggacaacgccacgcttgaaaaaattaccgatggtagtgtcattatcgaaggctttgctttaaacagtttctggtcattcccgtatatcggtttatcggacaaaggagtccctcaatttgcaatcatcgaccaaacacccggaactaaaacaagggttgaatcggctaccctacttgattacatggtttacagcggggtaaaagatcctgtgttcagcggtggattatccacgaacttccggtaccaacaattcacgttatctgccacgtttaacttccagctaggacatcataaacgtctgaatcctttcatgagaagtcaggctaccagcggaggcatcggacagctacgtatccccgatccggaaaaaaatgcaagcacagaactcaataaacgttggagacaaccgggtgatgagaaatacacgaatataccggccatattatcttcggatgagaatttagcagactatctcccggataactcactcagtttaagcaacaaaggtgaaatttatcgttatcagatgtataacctatctgatttacgggtggtaaaggccaatcatctgagatgtaataatatttccctgacgtatgctttaccgaaagatatactggatcaattaagacttacaaacttaacgttcgcactaaccgttaccgatccgtttattatcaaaagtaaaggactgggtaaacaagatccggaaactttaagtaccagtgcgaccacggttcttccggttattgatcgtcagcgcaaattctcgctaagtataagtttgggtttctaa

SEQ ID NO: 2119 - DNA, 2880 bp, unclassified Butyricimonas
atgggaacggccacggacgtggacgggaagttcaagttgttggttccggctgacacggccacgctagtcgtttcctttatcgggatgaagacggaggtcgtgaggattccccggttgaaagcgggcgtggaacagaaggagttgacgatcgtgttgcgggaagaggacgtgaaactggaagacgtggtggtgacgggtattttcacgcgtaagaaggaaagtttcacgggatcggcatccacttactcggctgccgagttgaaaacgatgggcacgcagaacgtgctgcaaagtttgaagacgctggacccggctttcgccattatcgaggataaccagttcgggtccgacccgaaccgtttgccgaacatggaaatccggggaaagtcgagtatgttaggtttacgggacgagctggatgccgacccgaaccagccgttgtttatccttgatgggtttgagtcaacgttggcagcgattaatgatttggatataaaccgggttgcctcgatcacgatcttgaaagacgcggcgtcaaccgccatttacggttcgaaggcggctaacggggtgatcgtggtggaaacggtgaaaccggaggccgggaaattgcaggtaagttataccggaaacatgaatctctcgatgcccgatttgtcgagttataacttgatgaattcaagggaaaagctggaatttgaattattggcagggaggtatgatccggtgaattggtccacgacgaacgaggtggaattaacccgtttgtataacgagaaattgaagaaaatcgagagtggtgtaaacacgtactggttggctgaacctttacgggtaggagtgaatcaaaaacattcactctacgtgcagggaggcgagggaaatttcctgttcggcttgggagcggggtataatggaatttccggggtgatggaaaagtctgagcgggatgtgatcagtggcaatatcgacttgatttaccggatgtcgaaattccagttctctaacaaattctcgttgacctcaactcatttcaagaacccgatcgtggcattcagcgcgtatgctgcggcgaatccttattacaaaaagtataatgacgagggaacggtggataaatggttggaatataatgattacttcaaagcttcgaacccgctgtggaacgcgagccaaaatagtcgggataagggaaataatctcctgttgagtaattatttcatggcggaatatttccccacgacggaatggcgggtacgtgcccggttgggattgacttacgggaatgatgacacggagaagttctattcccggaatgatacccgatatgagaacgtggaaactactaaaaagggagagtttcattcaaataacgtccgaacaaatcaagttgaggcggagttaagtgtcacgtacgcgaaagtactgggaaaacacaggattaacttggttgccgggggaaatatttccagcaataaatcgcttacgcaggggtattctgcggtaggattcccggacggagatttttcttacccctctttttcgaacggctacccggaatacgggactcctgcatactacgagtcggtttcccgttccgtgaacggttatttcaacgcggggtattcttttgacgatcgttacttgatggatttcagcctgcggacgagcggttcatcggttttcggtacttcccggagatacaatacgacgtggtcggtcgggttgggctggaacttgcacaaggagaagtttatcatggatcacgtggcatggattaatatattgaaactgcgggcctctattggaaatccggggaaccagagttttgactccgcgcaatccttgttgacttactcgttccagtttggttccatgaactacttcgggatcggggcggaattgtcgcagatcggaaaccccgatttggaatggcagatcacggtggataagaatatcggtctcgacgtgacgttgtttaataaacgcttttcgttgacggcagattactattacaaggtgaccgacccgttgttgatcaaggtgagtacaccgctttcttccgggacatctacttacatgacgaacgcgggagaacaggtgtcacaagggttgacggcatcggtgtcctattttattttccaagatttcgagaaacgcttctcgtggatggtacgggcgaacgtgcggacgcagaaaacccggattgacaagatcgggaacaagctttcctctctgaatgccagtggaaagggtgaaaacacggtgaggtattatgacggggccgacccggatgatatttgggcggtaaggtccgcggggattgatccctcgaacgggaaggagttgttttatgccaaggacgggagttacacgtacgatttctcgtatgatgacgaggtgatttgcgggaatacccgcccggacgtggagggcgtgattggttcatcgctcaattggaagggattttccgtgagcttgaatttccgttaccagatgggggctgacgtgttcaacgaggctctttataacaaggtggaaaatatttcgagaaatgatctgaacaagaatcaggacaagcgggcgttgtacgagcgttggcaggaagtgggggacatcgtgcatttcaaggatattgccagtgcggagacgaccccgatgtcttcccgtttcgtgcaggaagagaacgtgttgaccttggaatctatctacgtgggatacgagttctatgacggatggatcaaaaaattagggttaagtagtttgaagattcaagcatccatgcgtgacgtgttccgggcatcgaccatccggtccgagcgaggaattgcctatccttttgcccggagtatggaggcaggactttcgtttaatttttaa

SEQ ID NO: 2120 - DNA, 1137 bp, unclassified Butyricimonas
atggaaaaaattataaatccctttttaataaaaggatatgcaggcaaagagctgttttgcgaccgggaacaagaacttgacattttatacaaaaacgtatgtaatggagttgatacaacacttatatcccctcgaagaataggtaaaaccggcttgattctacgttttttcgattatttgaaggagaaagcatggggagaatgcgtgtacgtggatatttatgcatcccgcaacctagaagatcttgtccgcttattggcagaagccatattgctaaaatttccggagaaaacaaacatcggaaaacgtttcatgacttttttgaaaggattacgcccactgatcggctacgacgcattgacaggggaaccacaagtacaaatcgtgtatcaaatagcacaggaaaaagagaacacgttaaaaggtgttcttgatttcttagacagccaaaatgtgaatatcgtgttggcaattgacgagttccaacagataacggaataccccgaacaaaacatggaagctttattgcgaacatatatacaacaacttaaaaatatacgattcatttttagcggaagccagcgggcaatgatgttggaaatattctcgaatgccaaccgacctttctttgccagtacacaatacctcgctatagaaaaaatccagcaggacgtgtatgctacgttcattactgatttatttgaacgttacggaaaacaaatagacccgaattgtgttgcagaaattctcaactggagcagaaggcatacattttacacgcaaagtttatgtaaccgaatttttgccatgggtacatcccacgtgacaacagaacaagtaaaatgggcttgctctgatctattggaacgtaatgaacctgttttcttgcaatatcgtcaactattgactccaattcagtggaattttttaattgccattgccaaagaacacgaagtcaaacaaatctcagcacaacattttatcagtaaatatggaatcggttcacccgccaatgcaagacgattggcaaaagcaatgatcgaaaaagagttagttctcgaaaccgtggataaaactggggtgacgtaccaagtctatgatgtatttttttcaagatggttagaacgtgaatattaa

SEQ ID NO: 2121 - DNA, 2463 bp, unclassified Butyricimonas
atgaagaagacaagaattcatggagtgtggatattgttcctgttgagcgttgtcacttgtttgcaggtgaaagctcaatacatgccggtggtgttcgataaggtgtatggtgataaaaatcagattcaactggtttgtcctctgcccggtgatgaagtagctttagtaggtaaagaaggtcagaaatataacctgacatgggtggaacgggaaggagacgtggtcttttcacttcctttgacgggttttaccgccgtgaacgagatagcggagttggataacaaccgggttttggtggtaggacagtctacgatgccgaatgttaaaggtaaaaaagatagaatcacgttgtgcgggcgtatcgctgtggttgaacgcaacggacgtatcgttaccgatatttatgccggggatcagggcagtaatttcctgaaagggatgttgttgcggagcggggcgttcgtggtgtccggttcggagccgaaaggagcggacggtcgtcagggaatcctattgaaactggacccgacgggtagcgtggtttaccagtataaaaatgccgggggtggttattgcgaccagtttgcggtaatgggaaattcgattgaatacatttgtgcggcgttctctgccggaaaggataaggagcaggctctcgtggttcgtctggatgataagggaaaaccttattacatgacggcgatcccggcaaaacaatttgtcgtgaccgggttgaatgccaatattaatgacggttcggtactggtgatcggtaattcgccgacagacggggggattatttacaagattcgtccggagggggacatcgtgtttgcgaagaatatgattcccgccaaccaaggggccgctatgctagatcatcttcaggtggctcgtaatggtaacattttggttggaggtagtggaagtcaaggatattacgctttgttgcgtaatgacggaacagccttatattcgggtacgtccaaggggaatgtacggggaattgggatgaacccggcaaccggggagtccgtggtgacgacatacgacatgggcggacgtagaggtacgtttatacgtattcacccgaccgggaaagtggagttcgagcgttcactggatggtaattttgacaaaatgaaagtgactaacagcggggagattttattgttatcttcttctgaaggacgggtttgtatgttttcgtccacgggtgaaaaggagtttgaccgttacgtgacggataataaaccgacggcttatcgtcaggcatataccgcttcatccggggagttacttttcctaggagcgggaggtcgtctcgtgaaactgggacatggtctttatgtttcggacgtgaagatcacgaaaccggtgaacggaatagccacggctatttttaccgtgactctgaccgggtatgccacgacgaaagaaggcgcaccaattccggtaagcgtgggatatgctacccaagagaaaacggctaatatcgcgaataattttacaccggtgaaaggaaagctttcgtttaccccatctcggggaacggctgaccgttatctggtaaaacaggatatagaggtgtccgtgaaagcgaataatttgatcgaggggatgaaagagtttgaactcgtactttcggatgcacagcaaagttatctggtgaaacccgtgggtaaggcggtgatcgaggatcaacaggctgttgttaagatggttcgtacggaacagggagaagagggaacaaaagatattttatacgaacttggattattcaaaccggatggaactcctttgacgaactcgacgggagccaatatcatcgtggatggtatctacggggaaggaacagccgatgctcttgactttgatatgggattaaccccgagagtgatgtttgccaatggatcacagaaatcatcgttctctgtgaaaacgttggaggatacccgttatgaattacccaagacggtcgtgattaactttaacaaggtacattgcctgagtggttcgaacgtggcttttgaaggggagttgttgagttgtagcggggtggttgtcgatcaaccggcacgtttaatgattgcttcccttggcgatcacagattgaacaataatgttgtatcgggattcttcacggtgtctttggtgcgggcttctgacggggctttgcttacgaatgctaccggaagtgatgttatcgtgaattgtgtggcagttcctgatgcttcggctaaagaaggtaaagactttgtattcacgaatatgcatgatctccgcatcagtggtgacgggaatcatagttccgcgaacgtgtatggtgtggtgctatatagtacggatgcagcggaaaaacaagtgaagttgaagatcaagtctgtaactcaacccacgggtgcgcaaccgatcagtgtttcggatgcggaatcctcggccgagttcacgatccgtaaataa

SEQ ID NO: 2122 - DNA, 3495 bp, unclassified Butyricimonas
atggtatatttgcaacttgattttttaaatgtgcaaataagtaatatcttaaaatcaggagtcacgatggacaaaaaattccaagagtacaaaggtttggatctctctcaggtaaacaaggatgtcttgaaagagtgggaatcaaacaataccttcgagcaaagcttgaagaatagagaggggcacccctcgtttgtctttttcgaaggtcccccttcggcaaacgggatgccaggtattcaccacgtaatggctaggacgattaaagatattatttgcagatacaaaactttacaaggatttctcgtcgagcgaaaagccggttgggatacacacgggttacccgttgaattgggggttgaaaagaaactcggtatcacgaaagaaaatatcgggaaaacgatttccgtggctgactacaacaaagaatgtcgttccgacgtcatgaaattcacccgtgaatgggaagatttgacgaacaagatgggttactgggtagatatgagcaacccgtacatcacctacgacaaccgttacatcgaaaccttatggtatttgttgaaacaattgtacgagaaaggtttcctgtacaaagggtacaccatacaaccctattcccccgctgccggaacaggattaagcacgcacgagttgaaccaaccgggatgttaccgagacgtgaaggacacgacgtgcgtggctcaatttaaagtgatccgggacgaaaaatcggaaaaattgtttgctttcagcgatgaagtatatttcaccgcgtggacaaccacgccttggacgttaccttccaacacggcattggccgtgggtccgaacatcacgtacttggaagtgaaaacttataacccctatactttccgcccggtaactattatcatggcgaaagatcgtttcagcgcgtacttcaacaaaaaagctgaaggcatcaccttggaagactacaaggaaggagataaattgatcccttaccagatcgtggccgaatataaaggtccggagttggaaggcatacgttacgagcaacttttaccttggatgcaacccatgggtgatgcattccgcgtgatcctcggtgattacgttaccacggaagacggtaccgggatcgtacatattgccccgactttcggagccgatgacgaccgggtggccaaagtggcgggcatagcccccttgcaattaattgacaaggaaggcagcaagcaacccatggtggacaaacggggacgcttgttccggatggaagacattgacccggaatacttgaaaaataacgtcaacacggacctgtacggggaatttgcaggacgattcgtgaaaaacgcttacgatccaaatttaaccgaaaacgacacgactctcgacatcgatttaagtatcctgttaaaacgggagaacaaagcgttcaaggtcgaaaaacacgaacataattacccgcattgctggagaaccgacaaaccggtactttattatccgttggattcttggttcatcaaaacgacagccgttcgggatcgcatgatcgagctgaacaagcccatcaactggaaacccgccagcacgggcgaaggccgtttcgggaaatggttggagaatctagtggattggaacctctcgcgttcccgctactggggaactcccctaccgatatgggtcagcgaggacgggacagagaaaaaatgtatcggttcggtgaaagaattagttgaagaaactgaaaaagcaatacaggcaggaatcatgaaggagaaccccttcaaagatttcaaggtgggagactactcgaaagagaattacgagaaaatcgacctgcaccgcccgtacgtggatgacattatactggtttctcccaccggacaaccgatgtaccgggagaaagacctgatcgacgtgtggttcgattcgggagccatgccttacgcgcaggtacattacccgttcgagaacaaagaattgatcgataaccggacaaatttcccggcagactttatcgccgaaggagtggaccagacccgcggttggttcttcacgctacacgctatcgcgaccatggtgttcgattccgtggcattcaagaatatcatatccaacggactggtgcttgatgccaagggaaacaagatgtccaaacgtttaggcaatgccgttgatcctttcgacacgatcgagaaacaaggatcagatcccctgcgttggtacatgatcacgaactctcaaccgtgggataacttgaaattcgacatcgccggggtggaagaagtgaaacgtaagttcttcgggacactgtataacacgtacagtttcttcgccttgtatgccaatatagacaagttcacgtatgcagaggcagaagttccgtttaacgagagaccggaaatcgatcgctggattctttctctattgaacagcttgattaaagaggtcaccgaggcttacgagaaatacgaaccgacacgggccggacgggcaatacaggatttcgtgatcgagaacctgtcgaactggtacgtgcgtctctcccgtaaacgttactggggtggcgagcaaaccaccgataaactgtcggcttaccaaacgttatatacttgcttggagaccgtggcaatcttgtcctcacccatcgcgccgttctacatggatcgcctgttcacggacttgaacaaggttacgggacgatacacgacggacgttcatctagtagatttcccggtggctgacgcatcaatgatcgacaagcaactggaggaacggatgaacatggctcaacaaatatcttccatggtacttggactgagacgcaaagttcaaatccgggtaagacaaccgctgtgcaagctgttgatcccgatcttgaatgacgagatgaccacccaactggatgccgtgaagaacatcatcctgtcggaagtcaacgtgaaggagatcgaatacatcaccgacacggcaggtatcttggtaaagaagattaaaccgaacttcaagaccctaggaccgaaatacggtaaatacatgaaacagatttccgctctcgtagccgaaatgaaccagaatgatatttacaatttcgagaaacaaggaacttattcccttgaagtgggaacggaaacactggaactgacgctggaagacgtggagattctgtcggaagacattccgggctggttagtagctaacgagggacgtctcacggttgccttggacatcaatatcacgaaggaattacgtgaagaaggtatcgcccgggagttgatcaaccgaatccagaacttgagaaaagagagtgatttcaacgtgacagacaaaattgatctttacatcgggaaacataaagagatcaatgaagcggtcgagaacttcaaggcgtacatcgccagccaagttctggcagagaacgttacgttaatagataaagccgaggacggtgcccaacccatcgaaatcgacgacatacaaacgtttattaagatccagaaaatgtaa

SEQ ID NO: 2123 - DNA, 1509 bp, unclassified Butyricimonas
atgaaagcagaaaaatatgtactcgcactagaccaaggaacaacctcttcccgggccgtgctattcaatcatgatggcaatattattgccatggctcaaaaaccgatcgaacaacattatcctcatcccgcttgggtggaacatgatccgaatgagatctggtactcgcaatcatccgttgcggctgaggctgttgccaaagcaaaccttacaggacttgacattgcttgtatcgggatcacgaatcaacgtgaaaccaccatcgtgtgggatcgggagacgtcccttcccgtttatcgtgccatcgtgtggcaagaccgacgtacagccgatatttgccgggaattacaagaaaacggatataccgatatgatccgggagaaaacgggtttgatcattgacgcctatttctccgccaccaaaatcaaatggattctcgacaatatcgaaggagtacgggaaagagccgaaaaaggaaaactatgtttcggaaccgttgatagctggctagtctggaaattcactcacggacgagtacacgttaccgatgtcagcaacgcatcgcgtaccatgcttttcaacatacatacccagaaatgggataaagaacttcttgatctgttcaacatcccggaatccatgttaccggaagtaaagagtagtagtgaaatttactcagaaaccgcaacaaccttattctcaacgaagattccaatttcaggaatcgcgggagaccaacaagcggctctattcggtcaactctgtattgaaccgggtatgacaaaaactacctatgggacaggatgtttcatggtgatgaacaccggaaacgaggtggtcacttccgagaacaacttgctgagtacgattgcttggaagatcgggaactccgttacttatgccctcgaaggaagcgttttcgtgggaggtgccgccatacaatggctacgtgatggaatcaatttgatccaaagtgcaagccaaagtgaaacgctggcgacgtctgtaccggataacggcggagtctacttcgtccctgccctcacgggtatgggagccccttactgggaccaatacgcccgtggagccatgctgggcctcacgagaggaacaactcccgcgcacattacccgggccacccttgaaggcattgctttccaagtctacgacattctgaaagctatggaacatgacacgaaacgaacctctccggagatgcgagtagatggtggagcagtggccaataacttcctaatgcaattccaaagtgacatttgccgagaaaccgtgatccgtccgaagattcttgaaacaacagctctgggagccgcatatctggccggactggccaccgactactggcgggacacggacgaattacgccaacaatggagtatcgatcgggaatttacccctattgatacagaggaacacgtgaacgccatgctccacaagtggcataaggccgtcgaacgtgcaagagcatgggaagaactgggtgaagaataa

SEQ ID NO: 2124 - DNA, 3039 bp, unclassified Butyricimonas
atgatgaatatagctaaatattcgctggaaaacacgaaggtcgtttatttctttttggccatattgttagttgggggagttttatctttcgatctactggggaaaaaggaggattcgccttttgtgatcaagacagcggtcattataacgagatacccgggggcaaccccgagcgaggttgagcagttaatcacggagccgatcgagcgggaaattcaatccatgcgccgggtacacaagattaaatcggattcctattacgggatgtctaaaatacaaatcgagttgagcccggcaaccccgccggaggagatgccccaaatgtgggacgagttacggcgtaaggtgctgaacattcaaccgtcactgccacagggagcttcgacgattagcgtgtcggatgatttcggtgacgtgttcgggatatactacgggctgacggccggagagggtttttcttatcacgatttgcgggagtggggacaaaaattgaagactcagcttgtttccgtggacggggtgcagaaggtggccttgtacggtgaacagacggaggtggtgaacgtgtttatctccatgtcgaagttggcgaattcggggattgatctgaactctttgatacagacgatcaagtcgcaaaattctctgattaacacgggagagaaacgggcaggaaatttggaattgaagatattggccgacgggacgtacaaaacgctagatgatattcgtaatcaattgatcgtgacccagacgggacaacaggttcggctgggggatattaccacgatagaaaaggggtacatggacccgccaaacagtttgatgcgggtgaatggtaaaagggctatcggcatcggtatctcgaccgatccggagcgtgacgtggtgaagacgggggataaggtgaaggagcgattgagccagttggaggagttgatgcccgtgggaatcgaactcgtgaccctttacccggagaacgagattgcacgggaggcaaataacggcttcttgttgaacttggtggagtccgtggtgatcgtgatctttattattttgctggtgatggggacccgtgccgggttactgatcggttcctcgttgattttctcgatcggtggaacgatgctgatcatgcagtttatgggagtcgggttgaaccggacgtcgctggcagcttttattatagcaatgggtatgctggtggataatgccatcgtggtgacggataatgcccagatattgattaagaagggtatgcgtcggcgagatgctttgatcaagggggctacggttccgcaatggggattgctgggggccacgctgattgctatattttcttttttacccttgtacttggcgccttcttcggtggcagaaatggtgaaacctttgtttatcgtgctggcagtttcgctgggattgagttggattctggcgttgacgcagacgaccgtgttcggtaattttatactgaaggagaattccggagattctagtaaagatccttacgatacgaagttctacaacaggtttgtttccgtgttacggggattgatcaagtataaggtgatcacgattgtttcggtggtctgtttgttcttggtgtccatgtatatcatggggattatgccgcagaatttcttcccgagtatggataaaccttatttccgggcagattgtttcctgccggaagggttcagtattcgggaatcggaggatatgatgtcggatattgaggcttatttgttggatcaggatgaggtggtgaacgtgtcggtaacaatcgggggatcaccattacgatattatctggcaagtacatctttcgggccgaaagcgaatttcgggaatctgttgatcgaggtggagaaaaaggaacagtctccgatcgtggaggagcgtttgaatacttacgtgcgggagaattacccggatatgttgattcgttcctctttgttcaagttgtccccggcggtggaggccgccatcgagatcggttttatcggggagaatatcgacacgcttgccgccttgacggaacgggcgatgaatatcatgcgagaatgtgatatggtgacggatattagaagtagttggggaaataaagttcccgtttgggaaccggcctattcgcaggaacggggacaacgtctcgggattactcgccagtcggtggcttacgctttgaagattgccacgaacgggttggctatcggggatttccgagagaaggatttgtttatgccgatattgctgaaggaggacgggtttgatagtaagaatttggataacatgaagacgctgcccgtgtttgccacgtcggggttcacggtgcctttggcacaagtggtggatagttttgcctacgattatcattataacgtgatcaaacggtataaccgggaccgggtgatgatggcgcaatgtgatcccaagcggggtgcgaatacgaaagcggctttctcggaagtgtggaacaaggtgaaaagtatggatatgccggaaggctaccggatgaaaatattcggggaggacgagagtcaggtagagtccaacgaggctttggctgccaatatgccgttgacgtttattttgatgtttatcgtgttgctattgctttttagaacctaccggaaaccgaccattatattgctgatggtgccgttgatttttatcggggtggtcttcggcttgctggtgatggggaaaatgttcgattttttcgctttattaggtgtgttgggattggtggggatgaatatcaagaacgcgatcgtgctggtggaccaaatcggtatcgaacaggagaacgggttggccccgctggatgctgtgttgcaggccacgaagtcaagaatcgttccggtggcaatggcttcgggtacgacgatattgggtatgctgcccttgttatttgacgctatgtttggcgggatggcagcttgcatcatgggtggcttgctggtagccagtttgttgactatcgtggtgttgcccgtgacgtattgtttgatattcagaataaaagcggagtga

SEQ ID NO: 2125 - DNA, 1842 bp, unclassified Butyricimonas
atgaaaacaaatagcgttttaaagaaattagcatggggattagttatattcattggattatccaatgtcgttttagcccaaaagattcaagtaagtggtaaggtaatgcttgccgcggacagttcggcattacccggagcaaccgttctcattaaaaacacgaatattggcgtagccaccaattcgcaaggggattacacgatacaggcgaatgtaggagatactttacgattcagttttatcgggttagaaattttatatatcccggtaaaagagaagacattaaacgtttacctgaatacggatgacgaaacggcaatggtaagcgagtgcattgttaccggatacgaaaccatacaccacgaaagtgccgtgcttaaactccgttccggaatgcccgtaacattaacttccgagcaaaacacggaagagtataacgaattcgccgcaaattgcttcctgttggccttggacaagcctctttccacgttctcgatcgacgtggacaacgctgcttattctaatgtacgacgttttattaatcaaggaactcttcctcctgtcgatgccatacgcacggaagagttcctgaattatttcgcttatgattaccccgccccacgaggaaatgacccggtaagtatcaccaccgaggtttccaacgccccatggaacacgcagcacaaactggtacatatcgggatcaaggcaaaagaaattgccacggaaaaccttccggcctcgaatcttgtattcttgattgacgtatccggttccatggatttctccaacaaactcccgctgttgaaatcatctttgaaattactcgtgaaacaacttcgtccacaagatcgagtagcgattgttacttacgcgaaccaaacaaaagaagtacttacctctaccccgggaagtgataaagccaaaattctggctgccatcgatggattatatgccagtggcggtactgccggtggagatggaatccaaagagcctaccgggttgccgagaataattttattaaaggaggaaacaatcgcattatcctagccacagacggagattttaacatcggcatttcttcacccaaagaactagaaaagatgattgaaacaaaacgggccacaggtatattcctgacggttttaggtttcggtatgggaaattataaagataaccggatgcaggttctcgcagagaaaggaaacgggaatcatgcttatattgacaacctgacggaagcgaaaaaagtattagtaaacgaattcggaggaacccttttcacggttgccaaagatgtaaagattcaggtggaattcaatccggctaaagttcaagcttatcgcctgatcggttacgaaagccgcctgctggaagcgaaagacttcaacgatgacacgaaagatgccggagaaatgggagccggacatagcgttactgccttgtacgagatcatcccggtcggagttaaaagtaattttgcacccaccattgacccactgaaataccagaaaacaggaagagatgaaaagcaaaccctaacggatagtccggaattattaaccgtgaagcttcgctataaacaaccgaactcacataaaagttctaaaatggaagtagccgttatcgacaaagatacacctataaaaaagagttccgaaaatttccggttctctgccgctgttgcaggattcgggatgttattacaaaattcggattacaagaacgattttacattcgataacgttatcgacctcgctaaacaagctacaaattatgacccggaagggtatcgaaaagagtttatccggctggtcgaaagtgctgccttactaaaatga

SEQ ID NO: 2126 - DNA, 1059 bp, unclassified Butyricimonas
atgttacaagcaacctattcaaaatataacctgcacttcaaacaaccggcgggaacttcccggggagtgctcatggaaaaagaaacttggtttgtcaaagtctgggagtcagaacaacccgaaatatacggattgggagagtgtgctttgtttcggggattaagtgcagacgaccgcccggaattcgagaaaatattaaaagaaacctgcgaaggtttcggcagcctacgtgacatccgctacttgcgagattggagttctatccaattcggcttggataccgccatagcggatttaaataatggaggtaaacgcatcatttaccccacccctttcaccgaaggacaaacagatgtcgaaatcaacggtttaatctggatgggttccaaagattccatgcgccaacagattatcaaaaagttggaggccggattccattgcattaaattgaagataggagctatcgatttcgatgcagagttagacctgttacgcatgattcggtcacaattcagcaaagagctaatagaactccgggttgatgccaacggagctttctccccggaagatgcacctcggaaactggaacaattggctcaatatgatattcactctatcgaacaacccatccgtcaaggacaatgggaagaaatgtctcgtctatgccgaaatacccctattccgattgccctagatgaagaattgatcggaatcgaaggattaaacaaagacaagctacttgatactattcgcccccaatacgtcgtaataaaaccatctcttttaggcagtttctcaggctcatgggaatggattgcccgttcccgagaacgtaacatcggctggtggattacttccgcactggaatccaatatcgggttgaatgccatcgcacaatggacagcttatattttggagtgtcaccccacgggcatacctcaaggcttgggaacggggcaactctacacgaataataccccttcacccttggaacaaaccggctcgaccatccggtacaacccacaggcaagctggaatttatccccgctctctttttaa

SEQ ID NO: 2127 - DNA, 903 bp, unclassified Butyricimonas
atgtttgtatttaaaacaagagctatgataaaatcaatgaccggtttcggtaaagcaacagtggactgcgggacaaagaaagtgatcgtggaggtaaaaagtctgaattcaaaacaattggatattaatttgaggactccgagtatttacaaagagaaggatatcgagatccggaatatgataaagaacgttctggaacgcgggaaggtggacgtgtatatctattttgataatgcggaggacgagaaagatgttgccgtgaaccaatcggtggtaagacagtattataatcagatgctggaagtggcgggttcattaggagtggaaatcaacaagagcgagttgctgcaaaccatcatgcgtttccccgacacgatgcaagctaaaatggaagagttggatgaagaaggctggaattgtttgagaagtgccatcgagaaagcgttgtcggatgtcgatgatttccgtattcaagagggtaaagttttgattgcagatattttgaaacggatcgagttgatcaaaagcttgtcaggagaagtaccccagttcgagaaacaacgagtggttaccatcaagcaacgcttgcaagacaagatgaaggagtggggagagatcaaaaatattgatgagaataggttagagcaggaaattatctattatttggagaagttagatatcacggaagagaaagtccgtttggcaaatcattgtaaatattttgtcgagaccgtggagaaagaagaagctccgggacgtaaactcggatttatcgcccaagagatcggtcgcgaaatcaatactatgggttccaaagccaacgaccacgacatccagaaactggttgtccgcatgaaagatgaactggaaaaaataaaggaacagagtctcaatgtgctatga

SEQ ID NO: 2128 - DNA, 1365 bp, unclassified Butyricimonas
atgaagaaagtattgttttgtattgtatgtttgaacatggccttgctgtgtttcggacaaccggtgaaaataaaactggtggcggagcgggaggcttttgtcgtgttcgggaacgagcgttatgatttgaaaaagggagaaacccgttggattacgttggagggagaggatatgtacgggaaaaggttgttggcaaacgaggagtgttttttgtttttagaggccggggatttcttggaagtcgttttgcatgaaaaccggggggtggagttgaaggatgacgggagtttatgcgcggatcggaataattggttgcggaaagtagatttgttgaaacagaggttgcagtttgcacgcgttatgccgcaattgttgcccaaggaatacgaggggttgaatctggagagggtgtgcgactctttgaatgtttggttggcgacttatctggaaaagtatcctgccgatcggaaaaatttcgagaaggtgatgcggacagagtttaagtactaccgtctgttggaagcgaatggcatcaagtcttcaagggcaacttttcaggaattttccggggagatgttggctcgcttatctgaagtgatcccggatgcagaagatgatcgggtggtttattctccttcttactggcgtgcggtggaggtgtacgtggattatttacggatcgaggatccccgtaagttgcaaggacggggggaccggatatacgagaatgaggtgaagttggcaacgtatttcccgaaaggtgcggtgagggataaaatagcttacacgaatttggataatatcctttactgggtgcggccggatcgtcgaggagattttgataaatgcgtgaaacgattggctccccgttatgctgacgtgttacgggggaagttgaataaacaggacgctgatcggaaggcgcggaagttggtgccggaaaacttgtatcccgtgttatcgggggagaccatgaacggggagagggtggatttgtcttctttcaagggatcgtggattttgttggacgtgtgggccacgtggtgcggtccgtgttgtaatgaaattccgtttctggcaaagatggaagaacgtttgcagggacggaatatagaattcgtgtcgttgtccgtggacaaggccgccgaccgggagaaatggataaaaatgatgcgggaaaaagagatgaagggggtacagttgcgactgacgggtaagaaaagcgagttgaacgagacgttgtgtatcagtgggataccgcattttgctattattgatcccacgggaaaactggtgtggaacggtttgcccggtgtttcttacgggctgatttaccggatactgaaagaggttccgataagataa

SEQ ID NO: 2129 - DNA, 1257 bp, unclassified Butyricimonas
atgagatttgacgagctggaactagaggattcattgttgcaaggattagatgccatgaattttcaggaaacaacccctatacaagaattaacgatccctgttatcttagagggaaaagatttaatcgcctgcgcacagacaggcactggaaaaacagccgcttacacccttccgattttaaatcgattaatcaaagaagagaaccgatcggatacggtaaaagctgtgatcatggctcccacccgggaattagcccaacaaatagatgtacaattcgagggattttcttattttctccctgtttcgacagtagtcgtctatgggggtggtgacggaagtttatgggatcaacagaaaaaagcattgcgtctgggtgcggatgttgccatcgcaacaccgggacggttgatcgcgcatctgcaacatagcgatgtggacctttcgcaagtaaaatactttatccttgacgaggccgaccggatgctggatatgggattttttgacgacatcatgcaaatcgtgaacaaactgcccaaagaccgacaaaccatactcttctcggccacgatgcccccgaagatacggcagttagcccaaaacgtacttcgagacccggtagaaatcaacgtggcggtatccaaacccaacgaagccatcatgcaagccgcctacatctgccacgaaagccagaaaatgggtatcattgaagaacttttcagcaaaccggtcttacacaaaacgctaatcttcgcctcttccaaacaaaaagtaaaagacctcgccttcaccttaaaacgtaaaaaattcaatgtagcagccatgcactccgacttggagcagtcagaacgggaatctgttatgatggattttaaaaataataaaatagatatactcgttgccaccgacatcgtatcccgtggtatagatattgatgagattggattggtaatcaactttgacgttccccatgatccagaagattatattcaccgtatcggacgaacagcgagagccagcgcagaaggtgttgccttgacctttgtctccggtgcggaacaaggaaagtttcatcgcatagagcaatttattgaagaaacgatttacaaaataccgctccccacccacttgggaccggcaccagaatacaatccgaaagcattcgaacatggctcgtcaaaaggcagaggacgaaaacctagtggtcgttctttcgtaaaaaagaaaaaccacgccaagcgagaaggaggctcaaactag

SEQ ID NO: 2130 - DNA, 3693 bp, unclassified Butyricimonas
atgaaaaatttgcgagaaaaaaaagctttttcgggaatttattgcagagtgtttatgttgttggcggtgggtttgtgttcgataacaacactttgggcatcttccaattcggggtccccgcaacgggtgacaattaatcttaaagatgcggaaataaagcaggtatttgccgaaattcgtaaacaaacgacttacaatttcgtgtatagtgatgatcagatggatcaaatgaagaaggtgacggtaaacgtgaaggatgaagtggtggaaaaggtgttggatctgattttatccggtacgccatatacttacacgattgaagggaatgcgattgcgatcgtggccaaaagtgaggcggtggaaaaagtgaaaaagataacggtttccggtcgtgtggtggataaggccgggatacctttgccgggagtttccgtggtgataaagggtacgactctgggagttcccacggatattgacggtaaattctcgttgtcatttgcggagcagtcgaatgtggtatttgtgttttctttcgtgggaatgaaaaagcaggagatttcggtgaccgataaggaatttattgaagttgtactggaagaggatagagaggcattggcagatgtggtggtgactggataccagacgattgccaaggagcgggcaacgggggcttattcgatcgtggatgaggagacgttaaagaagaaaccgacgtccaatcttgcacaagcgttggttgggttggtgccgggattaacagtagtcagcgcccccgtggatgggcaggtgcggtttgctattcgggggcagggcaccatatcgcaagtctctatgggaaatgctaattttaagccggacaacgatccgttgatcgtggtggacgggttcccgatcagtgggtataggcttgatagtgatcctttttcaacgattaatccgaatgatgtagaatcggtgacggtgttgaaggatgcggcggcaacttctatctacggggcacgtgctgccaacggggtgatcgtgatcaccacgaaaaagggacgaacggggagtaagttggagattgcggcagatgcgtactggtctgtgagttcacggacagatttggactatttgttcaatatggcttcggcggagaatcaattccgtttcgaggaattgatgcataaatataatccgattaatcttgcaagtaatgatccttacacgaaactttcctcccggaggcgatatatgtcggctccattcggtatgctgtacgagcgggataataaaaagaatctctcagcgggagattatgaggctaaaaaacaggagcttatcgaattaggaaaccgggaggtgtggaaagatgatttgaacgagtatatgttccagcggatgatgcgtcagcaatataacgtgtcgttgcggggaggttcggagaagttggattacgcattctcggcttcttatgatgatgaagatagttacttgcaagaaaatggcaagcgacgtatattgttgaacttggcgagtaatgcccggttgacgaagaacttgacgttcgagtttgcggtgagtactatgtttgatcgggatgagaacaatgggacgagcattgaaagtatgcgggggtggcttagtccgtggacgagactgacggatgacgaggggaatttcgtacacgtggcaacctctcagacggtatatgagcctttgttaatgtcgggggaatattatgcaggaaagactccgacggactggacgtacaatcctgcagccgaccggaaatacatggataactattcgaaaacgatgaattacagggtacagggaggtttcgaataccggacaaattggggattgaacgtgagtgccaagggacaatatgaacaacgaagatatactaagcacgtgtcttacgagccggaatcattttacgtgagaaatttgtataacacgtatgccgagccgttagagtccgggaggtatgtttcttatttcccgaccgggggagtgttttcgaacgagggacacacgtatgaggcttataatttgcgtgggcaggtggattatacgatgataaaagataaacatatgttcaatgccttggtggggacggaggttatttccgccacgacggaggcggatccgaaagtgacacgctatgggtataataaatacactaattccgtgttgacagagttggattacgtgacgaaacggaataatattttcggggtatccgagtatatgcctttcgagaaattaggaagtctgtcaacattggaggatcgttttttctcggtgtatgcgaatgcgtcatacacttatgacgatcgctattcggtgactgccagtttccgtacggatgcatccaattttcaagcggaagacgtgcgtgataaattctccccgttttggtcggtgggtgctagttggttgatttcgaacgagcgtttcatgcaaaaggtctcttgggtggatcagttgaagttgcgggtatcatatggtatcgcgggtgtggcagccggtaaacagggaacgtccagtgtgacgacggtggctgtatatccgggtagcttggtttattctggtaacgagtcttttaatacgattgcggcacgcggaaacaacacgttgacgtgggaaaagtcgaggacactgaatatcggtgcggacgtggcgtttttcgggcataaattgagcggtagcatagagttttataacaagttttcgtacgatgtattggcgaacacgacagtgccggtgatttcacagggagagacatccatgttgttgaataatgcagagatattgaacaggggaatcgagtttaccatcggttcggatcttccggtagcggggaatttgagttggagcgggatgttgaattattcctataatcataatgagttgaaaaaattcggttacacggggccttatatgccggtgggaccttcatacgtggtgggacacccgatcggttctgtgggagtgctgaaagcggtggggtacacgcaggaaggatacgtgttgctggaagggaaagacggtacacgagagactatcatggattataattcctcgcacgtgatggatttcgtgatacctcgggaaggagagacgtttaatgatagtaattgggcttattatttgggaacgttggccccgacgagttcattgagttttagtaaccagtttagctggaaaggattgacactctctttcatgatcacggggcagtttggttattatgtcagtacgacttcttttgacagtttttcgcccgatagtagaaattcggcagcctattctaaacgcttgaaccgggctttggaggtatatgacgaaggatataccaatcagacgtcttattccgagttgccgctttacacggatagtaacgtggacgcattccggagtggggaaacatattcggccacaataggggcagcgatgtattttaagagcagtttcgtgaaaggcgatcatattcgcttgaatgaagtgttcttggggtatgatctaccggaaaacctgttagcgaaacaaggggtgttcagtcgggtaaatatttatgcgcaagcaagtaatttagggctaatttggagtgctaacgggaagatggatcccgattatcctattggaagtttgaaaccaatacccgtgttcacatttgggttgagactcggttttaaaagttggtag

SEQ ID NO: 2131 - DNA, 1827 bp, unclassified Butyricimonas
aaagttggtgttatgttttcagtggaattccgctatcgggcgagaaagatttataagtctgtaaaacagattgttgaactggtaagtaatgtgttattatttctagcctcttttctcgcaattattttagtcatttatcgtttcggctttgatatgccggctgattattctcatgagatatactacacctatcgagcgataattcgtcttttcgtagtgcttggcttgttgcggttcttgtttaatttcaggctgctgcgggcggaaaaaggattttggatagaagtgttagtgttacttttcctgtttgccttgaccttgttctccaaacacttcgaccgaccggatttcgaggagactaaccccttccttttcaaggtcgagcgaatattgacgtatgccgtggtattactattgagtatcatacaactctcgaaacagatatttgttgtcttgcgaagtcgggtaaaggcggaagttctttttgccgcgagttttttatttatcatccttttgggggctgttttgttaagattacctaatgccacgtacgaggggatcagtttcatggatgccttgtttacctcgacgagtgccgtgtgtgtgaccgggttgactgtcgttgataccggtgccacttttacgttgaccgggcaggtcgtgctgctcatgctgattcaagttgggggaattggggtgatgacctttaccagtttttttgccatgtcattcttgagtggcacctcctttcacgatcagttcatgatgaaaaacctattgaacgaggcatctttgagcgatattttccggacggtcgtgtatatcattctgaccacgtttatcatcgagggaattggtgtttaccttgtctacatgcaagtgcaggatgtagcggaaattgacaataaactctttttcgccttgtttcatggtgtttcggctttctgtaatgccgggttctccacgttgccgggcaatctctatgatcctttgatcaggcatttgtatggtttgcaagtcattttggcttttttgattatatttggtggtatcggattcccgatcttgttcaattacgggcgactcctgcattatggtattcggaataagatcaaatgtctgttgggtatgaattacaaggtggtccacgaacctcgcatcgtgagtacgacaacgcgaatcgtgttaccgaccactttaatcctgcttgtcgtggggacagccttgttctggatatttgaaaatcataacgtgttggacggaatgtcattcacgggaaaatttgccacttcgtttatggggaccgtcacccctcgtacggcaggttttaacaacgtggatatgtccatgttacacgttccgacaatcttcctcacgattatcttgatgtggatcggtgcggctccgatgtccacggggggcggtattaaagtaacaaccttcgtgattgctttaaaaaatatatgggcgaatctcgcggggaacgatcgggttgttatcgcgcatcgtcaattgactcgggagaacgtgaaccgggcgcattcaatcatcatactatctattctgtggatcattctggctgtttttgtcatcgtgattctggaaccgaaggcaacgctgactcaagctgttttcgaggttgtttctgccttggggacggtggggctgactttgaatttgacgccccatttatgtgtggcaagtaaaatgaccattgccctcaccatgtttgtcgggcgtgtaggcttaatcacccttttggcttgtttcatccgccatcaggatgtgaaactttacacgtatcccgatgaaaccgtaatcgtttaa

SEQ ID NO: 2132 - DNA, 2064 bp, unclassified Butyricimonas
gtgcagacaaatgactctacattcagtgtcatcaaacaattaaaagaagtcgtcatcacggctgaaaaaagggaattatccattagcgagattcctgttgctctcagcgtgattagtgggaaaaacttgttgaacgagaataatccggatcttcggaacctgtcaggaatcgttccgaatttttacatgcaggaaggaggcttgaaactatcaacaccgctctatgttcgcggaataggaacggtatccgggaccccacccgtcggtttgtacgtggatggtgtcccgatctttgacaaaaatgccttcatatttgatttgtatgacatcaagcaaatagaagtactgcgaggtcctcagacaaccctgtacggtcggaatagtatcatcggtttgattaatatccgaacaaatcctcctgcgacaaagttttcgttgcaggcaaaagcaggagtttccagctataactcccagaattacatggttatggctaatttgcctataaacaaagttctatataacaaattatcttttgcttataatcgcacggacgggtatttcaagaatgattttactggtgggaaatcgaacaaatcggattcatacgatcttcgttaccaaggaagcgtgttcacggatgcaacatggaaggtcgcgtttggtctgaactataatcatagttttgatgatggctacgcttatcatgccgttgattctttaaaagtacaccgctaccgggtcaattataatgcggatgcatcctataaacgggatttattgtccacgtacattaacattcagaaacatttttctcaaaccctgttgaactggatcacttcctattcccgggctaaagataaacaggttttggatgctgatttcacgtatcatgatgtattccaaaatggtaagaaatcgaaacaggatctgatcacgcaagagatcaattaccagtcctcccaaggcgagagaatcgattggacaataggaacatttggtttttacaaagacttggcgaatgactatttggccacttttggctcggaacgtcacttgttgctcccactggatctggatcaagcatcgtactacaataacacctctacttggggaattgccggatacgggcaagttaccgtgaaaaatctcttgccggggatgttcgtcactgccggaatcaggtatgattacgagaaagcgtctctctcctaccgggatagtttgttatttcacggggcaagccagttcaccggttatcatgattgggacgaaaaacattcttatgcggcttggttgcccaaattctccattctacaaaaatggaacgagcagttatccacctacttaaacatatctaaaggatataaagccggtgggtacaatatcatttcgaatgaaatgaccacgcaggttgtagaactggaatatggtaaagaatctttgtggaattacgaacttggagctaaatactttagtgccaacggacggtttaacatgaatggggcgcttttttatattgattggaaagaccagcaaatttttgtcatggagatgatggggccgattattaaaaatgcgggagacgcccgcagtattggagcggaaattgatttaagctgggaatgtctgccacgattggtttatttcctttcctcaggatatagtaattcggaatactaccaccacttaaccaaggaatacgaggggaataaaattgtcatggctccggaattcacgatgaacacaggggtagcgtactccaaagcaatcaagttctcattattcaaatctttcacagcaaccacatctgttaccggtttcggaacccaatattttgacgaggcgaacaccatgaaacaagatccttatttcctttggaacatggatttgggcatttccggtaaacacatcgatttccacgtgtggggtaagaacattttggataaaagtttcttttgctacatgttcaatagccccgtgggcaagaatttgccagaatacatgaaatccggacaatccggggctccctctcgattcggggcatctataacaataaaactataa

SEQ ID NO: 2133 - DNA, 3591 bp, unclassified Butyricimonas
atggaaaaaattctattatgccttagggtttaccaaccccatggacaaaaattttggaaaacgatgaagctttttatttttttgatgtgttgtttcacattttctctttcggcaaatagttttgcccaacaggagaaagtcaacttggatctacaaggagtatcgataaaaacgttatttagcgagatccagcgtcagacgaatctgcattttatttttaacacggaacaaaccgaacagttgaataaactgactgtaaaagcaaaagaggagtccgtgaaatccgtgttggatagagtttttgagggaacaggttttacttacacgttccgggataatattatcatggtccgtttcgaagggaaaagttccgtgcagcaagcaaataaggagatggaaattcgtggtgtagtgaaagataaaagcggggaaccattaccgggcgtaaccgtgcttatcgtggggacccaattaggaacggccacgggaatggatggtgatttcttgttacgggttccggaacaggacagcgtgagactgcgtttttcatttgtagggatgaaaacgaaggatgttccttataagaaaaatcaacccgccttggttgtcgtgttagaggaagaagcggagagtatcggggagatcgtggtaacgggataccagcaaatcgagaaacgtaacttgacgagttctgtggtgacggtgaaaacaagtgaactaaagacaattggagcatcgagtattgaacagatgttgcaaggtgtggttccggggctttccgtggtaaatacatccgcggctccgggtgcagctcctaagattcgtattcgcggtacggcgaccatctccggtaatgcagacccgttatgggtattggatggcgtgattctggaaaattccgtcccggtgacggctgctgatttgaacagtccggacgtgatgaatatgttcaattcggtgattggcggtattaacccgaatgacatcgagagtattaccgtactgaaagatgcttctgcaactgctatttatggaacacgtgctgccaatggcgtgatcgtggtcaccacgaagaaaggaaaggccaatagttttaatatcgcatatcaacacacctcaaccctaagtattcgtccttattacgataattttgatttgctgaattcaaaagaacgtgtcgctttggcttgggagaattatgtggatggtttggatctttggactggtacttattcaaaagggacttccggcttagagggattgctaaatagctacagtttaggacagatgactaaagagcaagtaaatttgatggctaataaactggaaggaatgaatacggattggtttaaaatattattccgtaatgcttacacgcaaactcataatctaagtatttccggaggaacagagaaaacgaattattatatttctttgaattataatggagaagagggcgtcgacaaggccagcgagtacaaaaattatggtggaatggtaaaggtgaatacggaacttttccaaggtgtgaatatgggggctatacttcaggttgatcgtcgggaccgggaaatgtatcattcttcgattgacctgttcaattatgccgtccgttcttcaagagctatccctttacgggaagaaagtggtgatttgcattattatcagagtacggtaagtggtcgggcctataaatttaatatattgaacgagttggcaaataccggaaacgagagtacccagacggatctaaaagggattgtcagtttgaatgtgaatttgtacaaaggattaaaatacgaggggttgtttagttattcttcttctcattcaacagcccgagattatgctactgaaaaaagtgcttatgtagcggatattagagggtacaattatggagaaggatcggaagaggatatagaaaaatctccgatgccttatggtggtgtgtataatgagacaacttacgaacagcgctcttcattaattcgtaacgggttaacatacaaaggaagtctgacagaagatttgtctattgatgtgttgttggggcaagaattcaggaatacaaattataaaggtttaaaatcaaataattacgggtatttccatgaccggggaaatacattttatgaacccgctttgggagagagtacagggaatttgcaacgaaacaaagtgactcgtagtctggttgatcgttctaatatatcttattatggtgtggtttcagccatgtatggtgatcgctacgtgttgaatgccaatatccgttttgacggatcgaatcttttcggctctaatcctaaatatcgttacttgcctttatggtctgtttccggaagatggattatcagcaatgaatcattcctatcggataacgaggtcctaagtaatttggcacttcgagcttcttacggtttaagaggtaatatcgtggaggatagtagtccatcgatcattgccgcggctttaccacctaatgcggtgaccggtttgttcgagatggagattcaacaggctcctaatcctgatttgaaatgggaaacgacggcttcatttaacgtgggcttggaattggggttgtttgatgatcgcttgactttggatgttgattattatttggatgaaagtaaagacttgattgcttacaagagtgtttcgtccgtctctggttttacgggaaaatatgtcaattatgccgatgtgcgcaatcaggggattgatgtctctttaagtggaactcttttgaaaaataaggattggagatggactgccgctttcaacatgggatatgttaagaataaggtaacgaaatccaagagtaccgcacagactaaatatctagtacaaagtgtttatacaccgggtgaagtatatgaaggaaaacctgtgaatggtatgttctcgtatcgttttgccaagctggatgaaaaaggtatgcccatgttctacgataaggatgggaaggtacttggcgtggatagtgaggaaattgtgaacttcccttatgatttggcgaatttgaaatatgaaggaactcgtgacccgatgttctccggagggttgaataccagagtatcatataaaaacgtttctttgtcaatgttgttcgctttcgggttgaagaacgtggtgcgtttaccggctcgtgcgtatgtatccgctccttctgctgatgaaaatgtgaatagtagtataaaagatcgctggcgtccgggacaagataatacgggtaaaacgatcccggccctatctttgggtgatggatatatcacgacggctgatggtaatttctttgcgacagattggtataatttatcagaccaaacggtagttcccggtgattatcttcgttttagaaacctgatgattgaatatcaattacctgttcattgggtgaataaagtagctattggagatcgtaaattgggaagtgttactttgaaatttcaagctcagaatttattcgtgatagcagacaaacgtttgaaagggtatgatcctgagacgattaattatacgacaacatcttatggttctttgccgctggctaggacgtttactttgggcttgaatgtcaatttttaa

SEQ ID NO: 2134 - DNA, 1671 bp, unclassified Butyricimonas
atgaaaacagatattgaaattgcgaactcgatcgagataaaaccgatttacgagattgcagataaattaggcatagacagagatttattggaaccttatggaagatataaagccaaattaccgttaagtttgattgataaatcaaagatagacggcaaaaaattggtacttgtatctgccatatcaccaactcctgccggagagggtaaaacaacaatctccattggtcttacggaaggattgaaccggataggaaaacaagcaacggtcgtactacgtgaaccctctcttggtccggtattcggtatcaaaggcggtgccaccggtggtggttactctcaagtcgttccaatggaagacatcaacctgcacttcacgggtgatttcggagctatcgaaaaagctcataacctgctatctgcccttattgacaataacattcaaagtaaaacacattctttgaatattgatcctcgtacggtaacttggaaacgggtgatggacatgaatgaccgttccttacgccatattatcgtaggcttgggtggtacgtcagctggaatcccgcgggaaaccggattcgacattactgcggcatccgaggtgatggccattctttgcttgtcggatgatttcgaggatctgaaaaacagactgggtaacatctttatcggttacaccttcgacaagaaaccaatttacgcccgggatctacacgcacacggtgcaatggcggccttattaaaggatgcaatcaaaccgaatttggtacaaactttggaaggcaacccggctatcatacatggtggtccctttgcgaatatcgcccaaggaaccaactcgatcatcgctacccgcatgggactaactctctccgactacgtggtgactgaggccggattcggttttgacctcggtgcggagaaattcttcgacatcaagtgtgtgaaagccggtttaaaacccagtgctgttgtcatggtggccaccgttcgggcattgaaatatcacgggggagccaaactggaccaattgaaagaaccgaacttagaagccttgaagaaaggagtggccaacttggaaaaacaggtcgagaatatgaagaaattcaatatctgccctgttgttgccatcaataaattcgttacagatacagacgaggaaattacattccttgccgagaaatgtaaagagcttgacgttcccatggaagttgccgaggtatgggcaaaaggcggtgaaggtgcggaaaatctggcacgtctggttgccaaggtggcagaacaatgtacttgtagcatgaaaccattgtacgattgggaatggagtgttgaaaagaagattgaaaccattgccaaagaattgtacggtgcagccgctattgactacacagcagaggctaaatccgacttgaagaaagtgatggacttgggcttggataaactcccggtttgtatcgccaaaacacagaaatcattgtcggacaacccgaaattactcggccgtccgaaagatttcgtggtaacggtacgccagatcgagattgcatccggagccggattcatcatcccgatcacgggtagcatcatgagaatgcccggtttaccggatattcccgctgccgaaaaaattgacatagataacaacggtaagatcaccggattgttctaa

SEQ ID NO: 2135 - DNA, 1908 bp, unclassified Butyricimonas
atgtatgttgtgcggaaaatgcatgctggtctgcccaagaggcgtggaaacccgaaagatgattttagaaatgctcaactatataaaaacaaaattgaaaagctgaaaccaattattatgcagcaatacgaatacacgaacaaaatatattacgatcactttgtcctgccgttcacgatcggactggtcgtgctactgggatacttgtgcgtgaaatactacaagtggatcaaaagctttccgaaagaagaacgtaaaaaaatccgcaaaggcttgttcagtttcaagaccattcgttccggttgggaaatcttccgggaaagcttgttgcatcataatatattcaagacgaacccgatgctgggatacatgcacatgacctttgctttcggatggttcttgttgatcgttgtcgggaaaatcgaatccatggtttaccataccagtgctttcaacccaccttattttgctatctttttccgttatttccacccggcaaaagagacattcccgtacagcgagtttttcgcgttcttgatggacttgattctgacattcctattaatcggtatcttactggctgtcaccaaacgtttctgttcccgcattttcggtatgaagaaaaccacgaaacaacgagcttacgatttgcttatattaaccgtactttggcttattttcccggtacgtttcctagcagaaagtttcactagcggtctgaacggaggcggtagtttcctcacgcacaacgcgggagactttttcagcgaatttctacccatggaaagcttatcttatcctgcttggtggctttactcctccttgcttggactattcttcctactattaccattttcccggtacatgcatatcccgactgaaatggtctatatcttcctaaaaaactggggagtaaaacaaggtaaagaatataacggattcagtgaaatacaggtcaattcctgttcccgttgcggaatatgtatcaacacttgtcaattaaacacgtcctgtaatataaatgacacgcaacccgtctattttctccgtcgcctgcgtaatcgagaggaatatgcccaacaagcggaagactgcctgatgtgcggacgttgcgagaattcatgtcccgtgggcattaacctgaatgccatccgccaaagcaaaaggccggatatattaagagttacaaaggagacgtatgcctacgtacccaaaccggaagtgaaacccgctaaagtcgcttactttgccggatgtatgagtcatcttaccccgggcattataaaatccatgcaacagatttttgaaaaggcaaaagcggactacacgttcattgatgaacaagccggagtttgttgcgggcgtccgttagctctttccgggaactggaaagcggcgcaagtggtcatggataaaaacctacaaatgattgatgcctcacaggctgatatattggttacctcctgcccgatctgttacaaaactttcaaggaggattacctgttgaatataaaagtcatgcaccacacggaatatatcaacatgctgattcaggaaggtcaattaaaggtcaacgcccttgatctgaagaccgtgttccataacccgtgtgaactgggaagaggctgcggtgtcgttgacgcccccgaaagcgtattgaaacaagtaagccagaaaatctcgacagcctatgacgggaagaaatcactctgttgcgggggtagcttggcaaatacggccattgattccacgcaaaaaacgaaaattagtagtgataccgtgaaagcatatgcggcgtaccagccggacgttattgtcacggcttgtcccctatgcaaaaaaacattgggtaaaacctcaccggaaatcccggtaaaagatattgcagaactggttgcagaagcctaa

SEQ ID NO: 2136 - DNA, 1383 bp, unclassified Butyricimonas
atgaagaaaatacaagttacattagttactttattactgaccggggcgtcgctatgcgcccaaacgatcggtgaaaaagaactgaatgacatcaaggggagtttccagaaagacgcttccacgaaagctattcagaacgtgttgaccaatgacaaaaatatccgggataatgcccttaaccgggagattcaaggaaaaatagaccactatttcaaatatcgggtaaaagtacagggtatcacggatcagcaaagttccggacgctgctggatgtttacttccatgaacgtgttacgtccgagcatcatcgagaaatacaacctcacgggatttgatttctctcacaactatctctatttttgggatatgttcgaaaaatccaatcttttcttggagaatatgattgccacggccaacaagccgatggacgaccgggacgtgaccttcatgttccaagctcccgtgggtgatggcggtgtatggaatctctattacaacttgggagaaaaatacggcgttgtacccaaggaagtcatgccggaaaccgctcactcgaacaacacgagtgccatgggatcattgatcaacgagcgtctccgaaaagggggatacaccatccgggaaatggccgctcaaggcaaaaaaatcaaagaattgcgtgcagaaaaagtatctgttttgaaagatatttatcgcatcttggctctatgcctaggagaaccgccaaccacgttcacttggagatacaaggacagaaacggggaaatcaaggaactggcaaactatacgccacaacaattctacaaggagatcacacctgctgattatagcccgaagaattacatcatgatcatgaacgacccgacccgggaatattataaagtatatgatattcaaaactaccggaacacgattgaaggtatcaactgggtatacttgaacctgccgaacgaggacatcaaagaagccgctatcgcatccatcaaagggaacgaggccatgtacacctccagcgacgtgggcaagtatttcaaccgggaaaccggaatcctcgatccggaaatgtacgactacaattcattgatgggcgtagatttctccatggacaagaaaacccgcatcctgacccgccaaagcggttccgcccacgccatgtcattggttgccgtggacgttgacgcgaacggcaaacccacgaaatgggaattcgagaacagttggggaccgcaagccggacacaacggttatctcaccttcaccgacaaatggtttgacgaatacatcttccgggtagttattcacaaaaaatacttgggagaaaaagcattgaaagcattagatcagaaaccgattttgctgccgatgtgggactatatgttctaa

SEQ ID NO: 2137 - DNA, 2013 bp, unclassified Butyricimonas
atgaaaaagaaatttgtttatgttctttttgcttgcctagccatggttaacatggctttgggccagcaaaacgagtcccgtttggccttaaatccggaagtgcccgtggccggtaagagtttggaattgacgtataatccgcaaggagggccgttagagggtaaatccgatttggtcgggattgtctatatgtataatttttatcactgggagatgggtgatgtacaattaaaacaggaaggagatctttggaaagggactttcgagatgccggaaaattgtgcttttatcgcttttaaattccagtccacgtttaccttgcaaccggactcaacggataataataacgataacgggtttatgtttattccccaaaatagtgcaggtgattatttgccgggtagataccttgcttggggtgtattccggatgccttcgctgggatcggaaaccgggaattatttttccgggaactacaaggagatttctaacgaggccgcgatgatgtggacggatcaggagacaaaacattatcctcaatatggtcgccactttttcgggactatgaaatcagttttgaaaaaaatgtatggggataacagtcgtcccggaatagcacacttgttgaaagtcatggaaagccaaccggatttgaccgagaatgaatacgaggaaatcagtagtacttaccggattgatttgaaaaataaagtgaaagcggatagtatcaatcaggtgatcctcaaattgttcccgcacgggggcttggctcgttttaaccgttctttcgagttgaatgctttgcctgaagaggaatactttgcggctgccgatcagtttcgaaaagatttcccgatagaggcatggaggaagaatccgaatcctagaggattcgtgtataataatttttatcgggagttggccacgaggtattacaaatcggggaattacaagaaactggaagaaatattgcctgagatggatatggtaatgatcaatgatgtattccggaaaagtgtcgagtttgctattcggaaaactcccacgccaccggaaacctatgtcgagatttcaaagaaattcatcgaccagatgattgctaaggtgggtgacggttcgtatcggcagacaatagcagcttctccccgacaagcggaagagcttgctcgcttgtggttgaattactacatctgtgttcatgctcaagttgccgaaaaatgtggtcgttaccaagaggccgtggacatgatgaatttgattgacgaggatcaacggtatatctcttatccggcaggaaatgaggcatacatcgtgagtctggaaaagttaggaaaccatactgaggctttcgaagcaatgaaaggtgcggcaagtgccgggcagatgactccggtaatttatgacaaattaagagagcattatgctaccttgaaggagaaacctgccacattcgaggcatggattgcatctctgaaaccgaagcatgaggtagaaaaaatcaagaataaacttcgtgcagaaattatagatataccttttgagccctttgtcatggaatcacatcagggaggaaaagtgaaatctgccagtttcaaaaaagatgaaatcgtggtgattgatttttgggctttgtggtgtgcgccttgtattgctgctttagatgggatgcagatggccgtggatctttatgctaatgatccgaccgtgaaattttatttcgtgatcacgcaagatgaaccgaaccgtgaaaagatagatgctctttggaagaagaatgatttccggaacatggaagtcctttatgatgcgaatccgaaaggaaagaattcacggaatgtcgtgtataaatccatgtttcccggaacgtcgggtattcctcaaaaagccatccttaaaaacgggcatatccgctatcgtgcggaagggtacggtggaagtcccagcggtctgatggatgagatttcttatgttatcgagattcttaaagaggagggaaatcatgctgagaaataa

SEQ ID NO: 2138 - DNA, 1833 bp, unclassified Butyricimonas
gtgcgccttattttttacctgctcttagtaatactcctatattcctgccgggaagcaacctcccggctcgaacaaaccctgcaacttgccggagacaacaagctggaactccaaaaagtactggaccactatgccagcgacagcctcaaactaaaagcggctattttccttatcgagaacatgccaggtcactattccctcgacggtccctaccttcggcaactccaacgcgtcatcgacagcacggggaccccttacttgatgaagaaagtcatcctcatgcaacccctccgttatccctattcccgccagcaactcagggcggaaccggacctcgaacaagtgaaagccgactacctcattcaccaaattgaccaagccttccggctatggaccaacagtccttggctcgaagacctcactcttgaaagtttccttgaatatttactaccttaccggattggtaacgaacccctcgactattggcgggattccatagattctcggctaagggaacgcctgcaagaggcaggacgctactttgataaccaaaaacactccccctataacatggcgcagatcgtttacggtcacgccctaggacttgattccggaaaggacaacctagcaggaatccccttctcggctaaagaatgtgtcttttctagccaactacaactactggcatatcgtatggtaggtattcccgcagccatagaccacgtcccctattgggccgacatgaacggattccacgaatggacggtcgtcatggatacccaaaacaaggacatactcgccggacagatagagatgaaaaacgccccgaaagtatatcgccgcacgtactcgaccaaccccattcccgttcccgaaaaggacgaatacattcccccgtttttcaccaaccccttcaaccgagatgtcaccgacaaataccttcacacctcggatgttacggtttccgcaactgtccccttgcaggcacgccacgcctatctcgccatattcaacgggcgggaactccgggtcgtcgactggagcgacgtgcaacaagacaaagcccgctttcacgccatgggtcccaacatcgtgtatttccccgtctatttcgagaaggaataccagcgaaacttcgcctatcccttcatcctgcgggcaaacgggacaaccgtcacattacgtcccgacacgacacgacgacagactctcaccctcacccgtaaatatcctttacatcacaacaaagtgtaccacggcaacgcccttgttggggcaaggtttcaagcatcgaacgatccaacattccgaaaccccgtaaccatccacagtgtcacccacaacccgaacatgcaacccgaaatcgttccggtcgacaccacgcaaaaataccgttactggcgatttaaccataccaagattgtggaactcgccgagtggagattcaaggacaagcggggtctaaacctaacaggaaaaagcattgaccccgaaggtagaggagcccgcctcgccaacatcttcgacaacgacccgctttctcacgggagaatatcccaccagctcgtcgtggacttcgaccaccccgtcagcgtgtcggaaatcatctacctgccccgcaacgacgcaaacggcgtgtaccccggaaacgagtacgagctattatactttgacctcggtggttggcaatctctcggttgtaaaatcgccacgggctattccgttgaatttgaaaacgttccatcgaatgcggtttactggctgcgcaatcacacggctggcaaggaagagcgtgtattcacgatacaaaacggggaacaacgtttctggtaa

SEQ ID NO: 2139 - DNA, 1290 bp, unclassified Butyricimonas
atgagcataaaagtattgatgtttgggtgggaatttccaccacatattgcagggggcttgggaacggccagttacgggttgacgaagggcttggcgaaacatggcgtcaaggtaatgtttgtcatgccgaaggccggaggtgatgaggatcaaagcgtcgtgaaaatcattaatgcgagtgatgtcgaaatgatgagcgagtattcgaatttggatgaatactggcagaatgtaaactttatggaaatcggttcgaatcttgttccctatctggacccggaaaccttcgaaagaacggtaaaggaaaccataaagacgggcgaacattccgagcatatcgttttccgtaacaagttccaattttccggtaaatacggaacaaacctgatggaagaagttgcccgctacgccatggtggcagggacgatagcggcgcaacaggattttgatattatccatgcccacgactggctgacctattcggctgggatcgtggcgaaaaaagtttcgggtaaaccgttggtgatccatgtacatgccacggaatttgaccggagcggggagaatgtcaaccaacaggtgtacgatatagagaaacgtggaatggaagccgccgatcgggtaatcaccgtgagcaatctgacgcggaacatcgtgatcaatcgttacggtattaacccggataaggtggtaacggttcataatgccgtggatttccagacacgggaagatattgaagtggaacggggagtgaaagaaaaagtggtcaccttcttgggaaggatcactttccagaaaggaccggaatattttatcgaggctgcgaataaggttttgaaacgttacccgaacgtccggttcgttatggccggaagtggggacttgtttaatcgttccgttcgacgtgtggcccaattgaaaattgctacgaaatttcactttaccggattcttacggggggatgatgtgcagaagatgtttttgcatagtgacgtgtatgtaatgccttctgtctccgagccattcgggatttcgccgttggaggcgatgcgtgcgggtgttcccacgattatctctaaacaatccggggtggcagaagtattaaaacattctattaaagtagattactgggatgtcgatgcgttggcagatgctatatatggtttattggcctatccggctctgggaaaaatggccggggaagagggattggatgaggtaaaccagttgaaatgggagaatgccgcgttgaaagtcgatgaagtttacaaggacgtattgggagtttag

SEQ ID NO: 2140 - DNA, 1101 bp, unclassified Butyricimonas
atggaaaacagattaaatgtaggaatcacgcacggggatgtaaacggaatatcttatgagttgatcataaaattgttggccgagaatcgaatttgtgagttgtgtgttcctatcctatacgggtcgcctaaagtggcagcctactaccggaaggtattaaatattgagaacttcagtttaaacacgattcgtgagccgggtgaggccaacgggaaacgatccaatatcatcaattgcgtggatgataacgtgaaggttgatcttggaaaagagactcccgaatcggatcaggctactatggttgctttgaaatatgccttggatcaattggatcgggacgagattgatgtgttgacgctggctcctcaggggccgaatgcgttcttcacggaagaggccgggtctttggtggaatatttgggtaagcgttataataccacggatattatgtccatcttggtgagcgaaaagataaagatgggtttcgtgaccgaacaggttaaattacgagatgtgccacatcaggttacacaaaagaatatcttcaagaaattaaccttgctggatgatactttgcgtcaggattttactattttgaaaccaaagattgctgttctggggctaaacccacaggtaaattgcggtcagaatggagatgaagaagtgaatgttattattccggcgattgagcgagctagagaagagggaattatggccattggcccattctctgccgaacgtttcttctcggagagaatgtacgagaaatttgacgctgttctcgccatgtattacgatcagggggttgtggcatttaagtccgtggacgaagaaagtgccgcttgttatattgccgggttacccgtgatttgttcgatgtctttaacagatcctcattatgatattgtaggtcagaatctgggtgatgaacaaggacttcgtaatgctctttatttggcgatggatgtttgcgtgcatcgggaacaaaatatcgagttacagaaaaacccgcttccacattatgacattgccacaaatagtaatgagagcgatttgaatgtggaacagattgagggagtaagagcggaacttgaagattaa

SEQ ID NO: 2141 - DNA, 978 bp, unclassified Butyricimonas
atgaaacatatatttttgattatcggattagtaagtgttcttacttttccggcgggagccaaaggacgtcctaccgtgatcagcgcagagatttacgggtatgtgcgggatcaggtgtattttgatttccttgagaaagagggaattaatatggaattcccgtataaggaggggcaggtgatcgagtttaccgtggacttggacgatgtgaccacgttggtgttgaatacatttatcgagatgtatttacagccgggggattctatccatgtgaaactgacttacgatggaaaacgttacgagtcggtggagttctccggaaccccggcagcggtcgctatctgttctgcgataaataagaaggagatgttgcagcgggaacgtcgttataaaactaatatcccggccatgctggtgactcggactgatgcgaagaagtttcacgcggcaacggtacaggaggtgaaggatgaggagaagattataaatgaggtaaaagatcagattgatcctcgggtgtataatatggcgatggcgcaaattgaagggaccttgttgacgaatctgatttcctatccttacgcgagtgcggattttcacaagaaaaaattggaggattgtctggccgaggactattggacggctttggatgattacaagctccggacggatgaagcttcgctgaggaatcgggtgtatatggcttttctcttgccttacaaagattatatgcgtcgtaaagaggctcatgatcaagggaaggactatcagccgttgacttccttggaagatcaatataaggatatggctgctttttacaaggggtctttgcaggatgcggcattattcgtgcttttgtacaattcaatcacatccaatggagattttaacgtgatcgagaaactggtaaaagattatttgaaaaagtataataagaataaggaatacaagaagattttgaatcaagtgatgcagtaa

SEQ ID NO: 2142 - DNA, 2451 bp, unclassified Butyricimonas
atgaaatatttgattgttggtggtgtggcgggtggtgcctcgacggcagcccgtttgcgtaggctcgatgagagtgctgaaattattatgttcgagagaggtgattatatctcttatgcgaattgtggtttaccttattatatcggagaggtgatttacgagcgggagaaacttttcgtgcaaacaccggaaagttttgccgcacgatttaatattgaggctcgggtgcgttcggaggtggagcgtgtaaatccggaaaagaaaataatcacggtccataatttggattcgggaggactttatgaagagacgtatgataaattgatcttgtcgccgggagcggctccggttcgtccatcgttagaggggattgacacggaaggaatttttaccttacgtaacgtgaatgatacggatcgggtgaaggagtatatcgaggagcatgacgtgaaacgggcgttgatcgtgggggccggatttattgggttggagatggcggagaacctgcatgaatatgggattcaagtgtcggtcgtggaaatggctgatcaagtgatgactccggtggattacgagattgctactgcagtacatcagcattttaagtcgaaaggtgtcgggctgcatttgcaggaggcggtgacagcgttccgctccgtggaggacggtattgacgtggtgttgaaaagcgggttggtgttgcaggttgatatggttgtgctttctattggggtgcgcccggatgtgaaattggcacgtgaggcgggggtagagatcggggagatgggaggaattaaggtgaatgagtttttacagacttcccagccggatatttatgccgtgggtgatgccatcgagttcccgaacccggtgagtggtcgtccagcgctggcgtttttagcgggaccagccaataaacagggacgtatctgtgcagataacgtggtgaatggtaatcatcaaaaatataaaggttctatcagtacggccattgccaaagttttcgacttgaccgtgggggcaaccgggttgtctgcaaagatgttggatcgtctgcaaattccttataaagaggccatcgtgcatggagcatctcatgccgggtattatccgggggcgattatgatggatataaagattaatttctcaccggaagatgggaagttgctgggcgcccaagctgtgggtattgatggggtggataaacggttggaaatgatgtcagccgtgattcggaatggtgggactatttatgatctgatggagttggaacaagcatacgcgccaccttactcgtctgcaaaggatccggtgaatatggcaggttttgtggcggataatatgctgagtggaaaagtgaagatgattagttggcgggaattgaaagatatggaccgatccaacgtgatgttggtggacgtgcgtacggccgaggagtttgcgatgggaagtatcgagggggccgtgaatatatccttggatggttcacggggagaataccaaaaattgccgaaggatcggacgatcgtggtgttctgtgccatcgggttgcgggggtatattgcagcccgggtattgatgcaacacggttatgatgtggtgaacttgaatggaggttacaagacgtattcaacggcgatggcggaacaatgtaacccgataaaatattcggaaccggaaccgaaaaagccgatggaagtgaaagctccggagaaagtggtggagaagaaatccctcacgatagatgcttgcggcttacaatgtccgggacccgtgatgaagttgaaaggtgggatggagcaattgaaggttggggaacgtttggagattaaagtgaccgatcaagggttttcccgggatgtggcatcatgggcgaagatgacgggaaaccagttggtggatgtgaaggaagaaaagggtataattacggccgtgttggagaaaggggcaggagtttgtcccgtggtgaaggaaggagcggggaacaacaagacgctgatcgtgtttagtgatgatctggataaggctttggcgtcgtttgttatcgcgaacggggcggcatcaacggggcggaaggtaacgatgtttttcaccttctgggggttgaacgtgatccggaaagagcgtaccgatgttgtgaagaaagacacgatgagcaagatgttcgggatgatgatgcctgccggaagtcgtaagttgtctttgtcgaagatgaatatgatggggatgggaacccggatgatgcggaaggtgatgcgtaataagcaaatcgattcgttggagagtttgattgaacaggcccggaacaatggggttgagttcattgcctgccagatgtccatggacgtgatggggatcacgaaagaggagttgattgacggggtgaatgttggcggtgtggcgacttatctggagcgggcggaggatgcaaacgtgaatctgtttgtttga

SEQ ID NO: 2143 - DNA, 2481 bp, unclassified Butyricimonas
atgcaaagacctttcaaatttaccaaactcaaactcatcacgggatatatcctaattctcttgttaggagcaattgcaattgtctttatctacaaacagaccattgccttaacccaaaaagggaatgatgaaatcgtcatgcaacaaaaattattcatcataagtaacacactcaccaaactatacgaggcagaaaataccggaattgccttttcccaaacaggaacacaaaagaattttgacacctatatgaaattgatagaggacatcaaggacaacatggataccttgaaaaatctatccatcagctcggaacagaacctacgaatagacacgataaatacacttctaggcaaacggatcaagaatctgaaagacttgtattacgtcaaaaaatattacatcccagaggatttctacaacaaaacaatcgaaaaaataggtacgctcaaagattcggcagatatcatccccgatctccgggaaaaaattattaccgtcattgacagtaactacatcatccgggaaagaaaaggattattccggacgaaaagagattccatcctaaaagtcgacacgaccctccatcgcatcgttgacacgctcagtatggtcacaacgaacaataacacggacacattaatgaacgtgattcgggattcatggagccagtaccagcagcaaaaggaagagatcgatgcggaagtctcccggcgagaggcgatcgttatccaaagtggtcaacacatcacggaacgcctcaagcgagtactgaaagaccttgaaaaagaagaactcgaaaacacgatgattcgcttggaacaacagcaaatcacgacacatcatctcaccagaaccatatcttggatcgcgatcatcgcttgtgtgctggtggtcttcttcgtcgttcttattatcaatgacatcacgcaaagtcaacgatacaggcgggaactggaagctgcaaaaacatacacggaacggttgctacataaccgggagaaactcatgctgactgtcactcacgacataaaatcccctctaagctccatcatcgggtacattgaactactaaataacacccaactggaggagcgacagcactattttctcaaaaacatgaaggggacagccgaacatatcctgcatcttgccaacaatatgcttgatttctccaaattggaatccaataaaatggagatcaacacggtcccatataacccgggacgcctgttacaggagacggcggatagtttccttcctttagcggcacaaaagagtctggaattgaaaagcgatattagcaacgccctgaacggactttacctcggggattccatgaaagttcgccaaatcgtggtgaatatcctatcgaacgccataaaatacacacgggaaggaaaggtttctttatccgcctttatttcccctacaaaagacgaccagtttatcattgtaatcaaagactccgggccgggaatgacggaagaggaacaagaactgatctttaaagaattcacccgcctaaccccgcagcataacaacggggcggaaggcacaggtcttggcttaacaatcacattacaactcgtccatttactaaatggtgaattaaccctcgaaagtaaaaaaggcgagggaagtaccttcacggttaaattcccgttgataaaggccacagcacaagaatcccaaccgacagaaacaccctcttcacccccagttaggcatgaagggatgaaagcctttatcgtcgatgatgacattcttcaattgaccgtcacgacagaattactccgaaaagcaggcatccagtgtgacacgtgtacgcacccccaagaggcgctatcccgtttggaaaaagggaattataacattgttttatccgacatccagatgccagaaatggacgggttcgaactcgtgcaacaaatccgtgaatcccaaaaccaacaaataaaaaacattccggcaattgccttgtctgcccgtgacgatatgcacgaaaaagagtatcaagaagccggcttttcagcttatctaaataaaccgtataccccggaacaactatatagcagggtaaacgacctgttaggatgtgcgatagaaaccaaacagtcgacaacacaaacctctgataaaaacaccccttataatttagacatgatcatggtctttgccgacaatgacaaagatgccgccaatcaaattatcgggtcttttatatcggattgcaagaccaatttccaactattggcccaacatctggaatcacacgaaacggaacagattgccaagttagcacacaaaatgctacccatgttcaagcaactagcgattaacgatgtcattccctcgttgcttttcctagaaaaaatgcccttggatacagaggaaaataaaataagagagagtattgaaaagatcctgcaagaaggaaacaatgttctccaattactggaaaaagaaacacgtcaataa

SEQ ID NO: 2144 - DNA, 2061 bp, unclassified Butyricimonas
atggtattcaacaaaacgaaagaacaggaaaaagaatatttacgacagattatcaacactataaacgattcgatcaataacacgaacaaatccgtcaaggaacacgttgacacgttacaagagtacaaggaatatctgtggtcgaataaagacatcgatccacacgagatacgctccatgagagaaagcatcctccgtcattttgcaacaggcgagagcgtcattgataaacgcaaacgactgggaaagattctggatattccctatttcggacggatagatttcacggaaaagaaagagggatgcgaaacaatggcattatatatcgggattcacacgttctatgaccccagccaaaaagccaacctaatctacgattggagagcgcctatatccagtatgttttatgaccatgaactagggaacgcatcctattcttccccctccggagaggttgacggagacatttccctcaaaagacaatatcgtatccgcaaaggtaagatggagtacatgatcgagagttcattgaccgttcacgatgatatcctgcaaaaagaactgagttccaatgccgacgataaaatgaagaatatcgtgaccacgatacaacgggaacaaaaccggattatccgaaacgaagaagcacaaacgctcatcattcagggagtggcaggatcagggaaaacatccattgccttacatcgtatcgcttatttgctttacacgctaaaaggggaaattacctctaaagaaattctaattatttcccccaacaaggttttcgccgactatatctcgaacgtcctcccggaactcggcgaagaaacggttccagaaaccagcatggaacaaatcctttcgggggttctcgataacaaatacaaataccaaaatttctttgaacaagtaacagaactactagataaaccgacaccggaatttattgaacggattcaatacaaagcctcctttgatttcatctcgcaattagaaaagtttgttctttacatggagaacaactattttaaggcaacagatgtcaaactgaccaaacatattaccgttccggccgagtttatcgatgaacaattccgacggttcaaccgttacccgatgcgccaacgtttcgagacgatgacggactatatcttagaaatgatgtctttgaaacattatttcaaagcgacaactgccgaaaggaacctgttgaaaaaggaaattcaaaagatgtttgccggaaacaacgacattcaagtttacaaagactttttcacgtggatcgggaaacccgaaacattcaaaatacgcaagaaccgtacgctggaatacgcagatctggcccccttggcatatctccacatagcgttagagggtactcctaccctttcccgggtcaaacaccttttgattgacgagatgcaggattactcacccatacaatacaagatcattcagaaactttatccttgtcggaaaacgattctcggggatgcctgtcaatcggtaaacccttatgggtcatcaaccgccgatatgattcagaaagcatttgtcacgggagaagtaatgaaactctgcaagagttaccgatccacgttcgagatcacgagttttgcacaaaggattcaaacgaacgaagaactggaagccatcacccgacacggggaagaaccaactgtcctctctttcaagaattcggaagaagaactttccgccatctcggaattaattgtcacgttcagaacgtcgacttacaaatcattggggataatatgcaaaaccgagatgcaagcacaagaaatcacagaggaactcaaatcgtacacggacaacctctatttcctatcccatcagagtacggctttcgccaaaggaatcatcgtcacctcatcccacatggcaaaggggttggaatttgacgaggtgatcattccccaagcgaacgataccaactacaacacgcttatagacaaaagtatgctttacgttgccgtaacgagagccatgcacaaactaaccatcacgcattggggcaaacccagtcgatttattccttag

SEQ ID NO: 2145 - DNA, 3612 bp, unclassified Butyricimonas
atggctttgggtctgtattttattttttgttttttcggctctgtttgcatttctttcttattattcgtatcattgtatattcatgtgtggcgttttattgataacttaatatacagtgctatggacattcataacttaaaaaccgttgcttgttataattcgagattgttgttgagaagttggatgttccggctgtttttgttattactttttctgattgttatactttatcaggtcttggcgcagaccaatattttttatggggtaaatagtggattggtgacgttatcatcttatcttcctcatgaaaatgcttatctattcacaatcttacaaattgtacccttgatctttttggcagggtcttttcttgggaaagagaggaagatggattcgatggacacggtttactatcgtccggagagtaatgcggattacgtggtgggaatgatgttgggattcacgaagacttttatgacgatggcggggatttctcttgttatcgggatgttgttgcatatttttgcgagtgagtctccttttaatttctggctttatcctttttactggctcacgataatttttccggctttggtatttgccttgggtttctctttcttcattcatacgtgggttcgtcaccggggacttggtatattgattcttttggtggtatttggggtgtttctgtttcagttgggtaaggtgcgggaagggctttttgatcccttcgggttgtctttaccgaatgctttttctgaagtgacgggacatccgggaatggccctttatcttatgcagcgggtttgctggttattcgtggggatggggtttgctggattggccgtgttgatgtttcaacgcttgccgaatcgtccggtgaaccgaaagcgggtgatgatcgtggcgatcggttgtttggtgctgggaggtctattcgggggagttgtctatatggcacgggagaacgtgaagaatattcgggaactttatgccgaaacttataataaatatcaaaaattcccgaaaggaaacgtggtttcgaataccttggaggtggagcaaaagggaaatgtgctgtccgggaagagtacccttcttgtcaaaaatcagggggatcaggaattatcggaaattattctttacctgaacccggccttggtcgtgtccgcgatacaagaaggtgagactgacgtgtcgtttgaacgggagaatcaagtgattcgggttgctcggaaattgttacccggtgaggaggtggaattaaccgtggagtattgtggcgggattgatgagcgggtgtgttatttggatgtggattttgataaattatttcaattgcagtccattcccgggcatagttctaccgcgggaaagcgatttgcttttgtcggggatgatttcacggtgcttaccccggaatgtctttggtatccggtagcccgaccgtcggtgaatccggcatccccgtatgatgctttgcccgattttacttcctactcgttacaggtggcatcgacagatgggcgaacggttattgctcccggaaaacgggagacgaaagaaggacgtgtctgttttacgggagatgttcctttgccggggatgggactttgtatcgggaattttgaaaagtatgatcttgtagttgattctacattatatgaactttatcttttcacggggcatggtaagcttttgcggggattcgaggaaattcgtgattccattccagccatcattcgtgatgcccgttataacgtggaggaacagatgggaatcacgtatccttattctcaattgactttggtggagactccggtctctttttccggttttgcccgtcctaataaagggggaagtgaaatggcccagcccgggatgttatttctgccggaacgggggatcgggatgtggaatgattataaggcggaggtcgcttttagaaagcgaatgatgcccgagatgtcgtctttttatagttctacggaggatatgctcagtagtgatctgactagatcgttatcttcgatgtttttgaatgagtaccgttataatgtaaaccaagcaagattgttattatattcggttgtttcgccttctctcttgtggcgtagcggggttgccagtactagtgtaggtaatttgtacacgattagtcccatgttttatgaacagactatggcattacattctgccgaatatccggcaattaattccatactaacagatgcgttaaagaaatcgaacacgttttttatctcttattctgagttggatcaagaggaacgatttgtcggacgtagtgtgggtgatcttttccgtgatcggttggataatccttacgaggtggcgactctgttgcatgagagaactttggaactattgcgtttgttaagtgtgaggaatattcccatggagcagattacagcgtttttagcgacgtttattcgggagaatcgattccggcaagttgaatttgatgagatgaaccgggagtttgttgaaaagtttggggttgattggatggacgttttgcccgcgtggtacgagaatcgtaagatacccgttttctttgtaagagattttaaagtggaaaatgttacatctcaggaggatggagaaggtagtctttctggtttcgctttctcgggaggttttacgattcctgatcaagcaaacagacgttctcgagtgtcggtgaatgtctttaatgatagtgatgttgatggagttgtttctttcgaggctcgggacgtgacattttcggggatgaattctcgtcggcagggtcgagagagggagaaagtggttacccggaattttttggttaaggcaggcaccggcatgcagattgccgtggtactgaaaggtatgacatcaacatttaatacaaatatttcaagtaatcttccaacaaagtttttcattcagggactgacgaatatttcaaaaacgacggacacgaccgagtacgtgaaagatctggatcgttcttatttcatgccggcccccggggagattatcgtggataacgaggatgagaattttaaattgatctcgcctccttctcggaaacggctacgaaatctgatttctcctttgagtgagtcgaggtatgagatgggttcaaatctcatgataagggaaggggttgaagttgttccgaggcacatgattaattccgaggcatacgggttgaataagcttactcatgctttcatgttacaggggagtaaagcgacgatggaatggacagcccgggttgaacgtgagggcgagtacgagattctggcgtatattcccccgaaggtttttgcccatcggatggaagagcaggagaaaggtggccggggaagtggaatctttactgtttcggctttttctgttacagaatcagaaccggaagaggtaaagcaatattatattgtggatgtcggtggggaaaagcaggaggtttctattgatattaaagagaatgtgggatgggtttccctgggacttttcaagttgcctgtcggggaatgtaaaattgtgctgacggaccaaggaaacaaggatcaggtccttcttggtgatgcgatcaagtgggtctatatgggggataaatga

SEQ ID NO: 2146 - DNA, 3393 bp, unclassified Butyricimonas
atgaaaaagaagaagtctaatctatctgcaaaatacgggagagtcggcacgttgttgatgctggtgatcctgttgcagtcctttggaatcggagtcagtcgggcgcagtcgaacgatgagccgagattgaccgtggagttcaacgaaactccctttatagacgtgatcaattacattaagcgtcacacgaagtttgatttcctttataataacgaggaggtgcagaagattccggccgtgacacattctttcaaatctgttccggcgtcacaggtgcttcaagcctgtttagagggaacggaatatactttccgcttgtttcagaatatgatcgtgatccaaaagcggcagaagacattagagtctgttagtgttcggggaaaggtgttggacgagaagggaatgactttacccggtgccacggtaatcgtgaagggaacgagtatcgggggaagcacaaatgatcagggaatgttcgtgttcagtttgcccaagatggatacgatttatctgttggtgagtttcgtgggaatggaaactcaagaggttgcgatcacgaactttacgcgggaagtagtggtatgcatgaaatttgacacgaaagaggtggaagaagtggtcgtaaccggttacggtaatgtacggaaaacgagcttcacgggtaattcggtgacggtttcccgggatgaactgttgaaagtttccaaaacgaatgtcatgaaggctttggaggtgtatgatccttcgttccgggtgaagaccaataatcaatgggggtccgacccgaatgccttgccggaaatgcagatccggggacaatcgagtatcggggtgaaggatttggaccgcaacacgctttccaaatctgccttggagaataatcccaacctaccgatttttatcatggataatttcgagaccacgatacaaaaagtgtatgacatggacccgaaccgtatcgagagtataacgatactcaaagatgcggcggcgacagcgttgtacggttctcgggcagccaatggcgtggtggtcatcacgacggtagcccccaaatcgggggaagtgcgggtgacttacaacatggttgggacaatctcaatgcctaacttgaatgattataacctgatgaatgcccgtcagaaactagaggcagaagtggcatccggcatgtacgatggggaaggagaggatttttggatacaaaaaatgagaattgaagaataccaagggaaactgaaaaacgtacgggaaggagtaaacacctattggttggcgaaacccttgcgtacggaatttaaccataaacatagtttgtatctagaagggggaaacgaggaattccgttacgggattgatttagggtataataacgagaacggggtcatgaaaggatcttaccgggatcgtatcgatgccggattctcgatttactacacgacttcgaaagtacaggtgagtaattatatcagttatggcgtgacaaaagagaaggaatcaccttacggggaattttcgcaatataccaagatgttaccttacgagcgctacaaggatgacgacggtaaaatgttgcgtattttacaatggtcgcgggtattggatttcgaaccgtacaacccgttatacgaggccgatttgggtaattttgacaaggggcaaactaacgtgctggtcgaaaacttgagcgtgaactggtttatcaagcctactttctgggtaaaaggagagttgggtatcagtcattcaacgggtaagcgggaggcttttattgatcctttatccgttaaaaataacttggaatatggtgatgaccgaactaatgtggggagtttaacattaacgaacacggaatatacctcgtgggaggggaaactggctatttcctataatgaatcgatcaataatcataacatcaatgtcgggggtggattggaagtaaaaacgacacgcaggcgcacgaataccggaacttataaagggttccagtctgccgaattttcttcacccgaatttgcccggtcgatgccttataaacctagttttcaagaagtgcaaactcgtctattcggtatgttcgctcgcttgaactactcgtatcaagacatataccttctggatgcatcccttcgaattgacggttcttccgagttcggttccgacaaacgttacgctcctttcttttcaggaggtttgggattgaatattcacaagtacgatttcatggagaaatacggttttatcaatcacctgaaagtgcgtggttccttcgggcaaacgggtaaggtgaatttcgccccatacgcggccgttcctactcacgagattgatattgacgaatggtatatttccggtccggcagcaagcttgatgacaacccgcgggaatagggatctgaaatgggaaaagaccaataaattcgatgtcggtttcgagttgggtttattgaagaatctactttaccttgagttttcatggtacaatgaaatcacgaacggcctgatcaccgatgtcaccttgccaagttccacgggattcaagacatacaagagtaacatgggaaaagtcgagaacaaaggattcgagattcaattccgaagcgatttactcagcacggcagattggtacgtggcagtctttgccaacttggcgcacaacacgaacaagataaagaaaatatccgatgccttgaaggcttataatgatgcggtgaacgagtattacaaccaagaaatcgaaagtctctgggacaaggacaatccaaacctgaaccgggtgatgacgaaatacgaggaagggcaatccctttccgcaaagtacgggttgaaatcccttggaatagaccctgcgaacggtcaggaactctacgtgtaccgggatggaacggtaagttacgactggagcgcgacagagatgcggaatatcggggatgaaatgccttggggtaccggttctttcggtgtgaatttacggtggaagaacatcacgttcagtaccagtttcctgtatgaattcggtggcgatttctataacgagacgttgattgacaaggtggaaaatgccaagatcgaggaatataacgtggatcgtcgtgccatgagccagcgttggaagaaattcggggatgtggtcatgtacaaggatattaaggataatacacagactaccgatccgacttcccgttttatgcagaggaataacgtgttgagttggaattccatgacgattggttacgagctggaccgggagatgttgaaacggatcgggatagagaatatccggattgaagtcggaacgaacgatctgtggcggctttccacggtgaaggctgaaagaggtttaagttacccgtatgcgaactcggtaaatttttccgtgaatgttagattctaa

SEQ ID NO: 2147 - DNA, 1482 bp, unclassified Butyricimonas
ttgaagttagaatataaaaacgagaaagtgatgaataggattacggaatgtaaatctgtattaagtttaattgttgtattactgtgctttatcttgcagtcgaatgcgcagggggtgttaagtttggaggattgtcggcggttggcgatagagaacaataagaaactgaaaattgcagatgaagacgtgaaggcgagtgaggctcaaaaagccgaggctttcacgaagtatttgcctagtattgacgctatgggcgtgtatttgcgcaaccagaaagagattaatttgttgtcggatgatgcccatttacctgtcgggtcgattggctcggacgggaagttcacgtttcgtcccgatcagttgatggtgggttcggacgggaagccggtgatggtgaacgggcagtatgtcccgaaggattatgccctgttgccaaaggaggcgatgaccgtggacgaacgaaacttaggaattgtgcaggtcgggctgacccagccgatttacatgggagggaagatcagggcttataatcagattgccgggttgtcggagcagttggcgaagagtaagcggtcgcaggagttgcagaacgtgattctctcgacggacgaggcttactggcagatcgtttccttggtaaaccggaagaaattggcggataaatacgtggagacgttgacgaagttcgtgcatgatgtcgagttgatgtacacgacgggggtagcaaccaaagcggacgtgctttccgtgcgggtgaaactgaacgagggggagatggtccaaacgaaggtggacaacgggttgagtttgtcccggatgttgttgaaccagatttgcggcttgccgacagacacgatcgtgatgttgaaagaggagatggcagacacggacgtggaggaggtgccagcggagagtttggaacgggtgtatagccggcgtccggaggtggcgagtttgcagttggccacagatatatataaaaagaaggagaagattgctttgtccgagtatttgccgacgattgctttaacggcgaattatttgagtagcacgccttctttctttgacggggtgagtacgaagttcgacggaatgtggagcgtgggagtcgggattaaggctccaatatttcactggggggcatcccgtaagagtttacgtagtgcgaaggcacagacgaatgcgatgaattataagttgcaggaggcaaaggagcagatcgagttacaggtgaaccagtcggaattcaagatgaaggaggtgacgaagaagttggcgatggcccgtaagaatttggaacgggcggaggaaaatctgaagtttgcgaatttgggtttcaaggagggaacaattcccgtgctgaacgtgttagaagcacaaacggcttggttgacggcgaattcggaactgattgatacgcagattgaggctcgattgtgtaaggtttatttggagagagcttatggaacgctggaattttag

SEQ ID NO: 2148 - DNA, 954 bp, unclassified Butyricimonas
atggaaaatttaaaatttagaattaacaacgtcatgtttttagaaaagtcatacaaaggtaacaacaaatggtatttttacatcctcacgctcattatcgtgtttgccgcagtacaagtagcgtcaatcccgttagtaatttacagtatcatcatgaatcccgaaatactaagcggggggacgaataacattctggccgtcacgaacacgaatctgggcctagcactcatgctattcacgttcgccggaggcgtcatcgcacttctgttatgcgtgaaatatttccatcacaagaaaccgacggatatactcacgggccgaaatcgttttgacgtgaaacgggtgttcttcggggctgccatatggggaatattaaccatcgtcctactgggtgcgcaatacggattcggagacacgtctaacctcgtgttccaattccagccattcaatttcatcatgatgtgcatcgttatactgattttcattcccttccaagtggcattcgaggaatttattttccggggatatctgatgcaaggcagtatcctacttttcaaatacagatgggtagccctattacttaccggttttgccttcgggttacttcacgggtccaacccggaagtggatcgtttcggtttctgggtagctatgccgcaatatattctgatgggattactccttggactggtagccatctgggatgacgggttggaattggctttggggttacacttggccaacaacgtcatttcctcccttgtggtaacacatgacgcctccgccctgcaaacacacgcactgttcaaggatatggcaccaacggcttcgcacatggataccgtggtgatgctcgtctgcggggtcattttcctctgggtttgtaaccggaaatacaaatttttctctaagggcaacctgtggggaaaagtagaacgggaagtcgtcgagtaa

SEQ ID NO: 2149 - DNA, 3657 bp, unclassified Butyricimonas
atgaaaaaaaatgacaaccccaacagcttgaggagatttaagttgtggagaaaattgttaatcgtgaagttgctatgcgtatgcttgttcttgcaaaacactgctttatcggcgagtgtttactcgcaagagttaaaattaacgttgaaagggaatgatattagtctgaccaatatcttttcccagattcgggaaagtagtgattacacgtttgtatataatctggatgacattcaaaatgtacgggtgaagtctctggatgtgaaagatgcatctatccgggaggttttggacaagtgcctgaaaggaacaggattttcttacgagatcgaggatcacgtggtgattatacgtccggatcgtccggccaagcaagaggtgaagaaggtgaccttgaatggtttggtaatggatcaggattccgtgccgatagcgggagtaacagtcctgttaaaaggaacttacgtgggtgtaaccacggatattacgggaaaatttcaaatggctatcccagaacaaaaagaggtgtttttgttgttttcgtttgtaggaatggagacacaggaagtcaaagtaattgattttaagaaacagattcgggtggtaatgaaggagaaggttggacaattggaggaggtggtaattacgggatacgggcagacgacaactcgtagttcgacgggttctacagctagtttgggacaagaggtttttgcaaataaagcgacgccgacagtggatatgttattacagggacaggttgccggggtgagtgtaatggcaatttccggtcgaccgggagaggctgccaaggtcagaatacgaggaacgaatacaatcagtggggatgcggaacctttatgggtggtagatggggtccctttacaacagaatgtgccaaatatctcgacggggcagattaaatcgggtaatctgaacgagatttttgttacaggaatagccggaattaatccgaatgacattgagaacgtgacgatattaaaagatgcttcagctgctgcaatttacggatcaagagctgcgggaggtgtgattgtgattacgacaaagaaaggaaaagcgggaaagatgagggtcaactattcgaccactctttctattggactaaaaccgcaacgagatccggggttaatgaattcttccgagaaaatggcttgggaacaggaattatgggatgaattttcttcggaatctttcgtgtataatcaagcgcaaacggatccacggaagaaaatacatagtccggtggttggtattgtaggaatgctccggtcggagaaacttggtaaagacgataaactttggcacgaggatgattttgtgccaatgagcaaggaagaacaggatgcttatattgcaaatttggcaaaacattcgacggattggtttgacgtgttgtttcgtaattccttctcgatgaatcatcatctttctttttccgggggatcgaatcaatatacctattatgtttctttgggggttacggatgatcgaggattagtaaaagaaacagattatcaacgttataacctgaatgcaaaggttgatttgaatccatctgatcgtttgaatctcggttttggtatcgatttatcaaaacaaaaatcagatagctattctatgacggtaagtccttttgaatatgcctattttgcaaatccttacgaaacattatataacccggacgggagttataggtcagatcggacttattttaatctggcaggtattaatgatggtaatttgagtgatggggtacagcctcctagcgggtttaatattatgcgggaaatgaaggaaacttcgagttctgctgataatacgagtgcttccgtgcggatgaatcttggttatgatatcatagaaaaactgagaatttcaggattggtatcatacacgtattataacaataaggtggatgatgtaaaaggacgggatacttatgccgcttttttagatagactttattttgatgagaataatagcgagtggattccttatggttctatcacgcagacttcatcagatggttcaagctacaatgttcggggacaattggaatatcgggatgtgttcggggatgctcatcaggtaactttgttgggaggagccgagttgaggggggataagagcgatcggacttatgcgaagcgtttcgggtatgatgacgtgacgggtaattcggctatgccggtgcatccgaatcctcaagtggaagatgtgaaacgttatgctgatttgattgaccagttgtccggagaagtgagttctgaaagtcgttttgcttcattctatgcttctttggattatagctatttgaagcgttatttgttgagtgttaccttccggacagatggttcgaataattttggtagtgacgaacagtttaatccgacttggtccttagggcttgcatggcatttggatgaggaacggtttatgcatggtttgtatcctatcgtgagccgtttgacattacgagctgccatgggatataccgggaatgtcgtgaaatctgtcaataaagatctggtattgaattactcgacaacttattgggatggattgagaaccgggaatattagtgccgctcctaatccgaaagtgcgttgggaaaagacaaaagacatgaagattgcattggatttcgggttattcgacgaaagagtcagtgggttggttgaggcgtattatcggaagagttccgatgtcgtgtcaacagtagatgttttgtctacaaccggattttccggacagggatttaatacttcagagataaaaaataaaggaatagaaggaaccttgcgggtgaaagtattgaatggtaaggattttaaattcactctagctgggaacatagcgtggaaccgtaatattttgtcgaagtatagcaaaaagcgtgtgataacggacggacgatatgaaggtttcccattggaatctgtttttgccggacgttacacgggaattgatgcgcgtgatggtgtgtacacgtatgagctgagaccggatgcccagatttataaaggaacggatttgcaggccgtggataattaccggtattatttaggaacctctgtttctccggttaccggcggttttaatgtggacttttcctataggaatttgcgtttgaatgttggtggtgttgtttcttcgggggcaaaattgctgaacatggtgaactctccggcaagctacgagataatcacctctaaccggacgggagaaactcctcagaccgtgtatagtgatctgtaccgtaatcatttgaatgtttcgaaagatatggtgaatcgttggacagaggaaaagggaaccggggtgaagtatccaagaataatagattttatgggagagcgattattattggatcaatacaacgtgcattcacaagaaatcacgaagggggcttatctagaaaatgtttcttttttgagaataaagaatatttcgttattctacgatctaccacaacatatcgtgaaatctttgggattgaatacggtagggttctcttttaccatgaataatttcatcacgtttacgaattattccggtattgatccggaaacaccgggtacgacttacccgatcacccgctctataacgttaggaataaacgtgggattttaa

SEQ ID NO: 2150 - DNA, 1578 bp, unclassified Butyricimonas
atgcgttttgtgtttttgtggctatgtgcgattttattttcaggtgtagtatatggtgagagtgatcgggattcgttgaaagtacgattgggtgcgccccggctaaatttaggggcgccggtgttgctgacggattctattccgggtgcatttatcgaacgattggatgaattatacagtaaatggtacgtttccagattgggggaaggtaattatgtggattcggtgtacctgactgaaatggtgaccgggccggctgttccggattcggtgtatttacaacgtttggataaattaaattcagcgataaagctttcctataacgatattgtacggaattatattgaattatataccgtgagacgtcgagcccaagtgggaacgatgttggggttgagttcctattatttccctatttttgaagaagtgttggatcgggagggattaccgcaggagttgaaatacttgcccgtgattgagagtgctttgaacccacgggcattttcccgtgcgggggcctgtggcttgtggcagtttatgtacggaacagggaagatgtacaagttggaaataaattcttttattgacgaacgtcgtgatccggtaaaatccacggaggcagccgtttgtttcttgaaagatttgtataagatttacgaagactggattctggtgatcgcggcttacaactgcggaccgggtaacgtgaacaaggccatacgacggtcgggaagtaaaaagaattattgggatatttatttccatttgccgaaggagacacgtggctacgtgccggcttttatcgctgccatgtatacgttcaattaccataaagagcataatatttttcccttggagaatgagttgcccacgatgtgtgacacgatcatgatttccgatgccttgcatttcgagcaggtggccaaattgatggatatatccgtggaacaaattcgggatttgaacccgcaataccgttcagatatcgtgcctgccggattcgggaagagttacgctttgcaggttccttataatcatgttggagagtttattgataaacaagatacgatctttgcttataaccggacgacttattttaatgatagtgaccgtacggccgatccgaagaatcgtttcaagaaatacgctcatgcccatgctgtccctagcaataaagccaaattggtttacacggtgaaaagtggggacgtgatcgggaagattgccgagaagttcaacgtgcgtttatccgacttgaagtactggaacgggatgacaagagaccggatcaatatcgggcagaaacttacggtttacgtgccgaataataaggtagactattataagtctaaagtgaatgccaagtatgccgggattgccgcaaatgcggaagtcgaggcagaacctttaacagaaggcgagttcttctactacacgatcaagcgaggcgagaatctgtggtcgattgctaagaaatatccgggcgtgtcgaaccgggacatcatgaaatggaacgggttgaccgaccgatcggcaaagaatctaaaaccgggacaaaagttaaagattaagatttaa

SEQ ID NO: 2151 - DNA, 378 bp, Subdoligranulum sp. CAG:314
ggagagttggcttttcaaaaggaagtgaacaccgtgattaaaagaggagaactgtattatgcggatttaagccccgtggtgggcagcgaacagggcggcattcgccccgttttggttttgcaaaacgatattggcaacaaatacagccctaccgtaatcgccgcggcaaccacgtcgcggctgacaaaagcaaagctccccacccacatagagctgcccggcgacaaatattgcctgcccaaggacagcgtggtgctgctcgaacaaatccgcaccatcgacaaaaccagactgaaagaaaaaatcggagaactgcccgaggacgtgatgaaggaagtgaacaacgcgctgcttatcagtctcggctttttccactga

SEQ ID NO: 2152 - DNA, 366 bp, Subdoligranulum sp. CAG:314
atgaggacgagagaatctgaggaaatgtacctcgaaaccattttgcttttaaagaaaaaaaagggcaatgtccgttccgtggacgtggtcgaggagctgggttacgccaagtcaagcgtatcccgcgcggtaaacctgcttatccaaaagggctacgtaaacatggacagaaacggagacttgacgcttaccgcaagcggcgaagaaaaagcctcctccgtgtttgaaaggcactattatattacgcgcgcgttgataaaaatgggcgccgacgcggctcttgccgaagccaacgcgtgcagaatcgaacacgtcgtttcggacgatatgtttgaattgattaaaaaattcgccgcgtgcgactga

SEQ ID NO: 2153 - DNA, 639 bp, Subdoligranulum sp. CAG:314
atggtacaaaaaaaagcttttttaaatatttatgtgtcgtcttatccctttgaatgtgggagtcaaaatatatcattcgcaccgagagcggaggaaatcgaggcctgcacaaacgaaaatgtccgcaggcaaaagctttatgtatggaagcttttggagcttgccgtcggtgatttgtcgggcatggatttaaatagcttgaacctaaggaaagatgaaaacggaaaatggcagtcggataagatttatatttcgttgtcgcacagcggcaatgttgtcgcggcggcggtgtctgacagctcggtaggcttggatattgaatttttcaatgaaaaaaaattcggaaagtcgcttgcaaacagaattgcaacagagagcgaaaaatctttttttgcaaaagagcgtgctttttcggagcgagtgtgcgccttgtggacgaggaaagaaagcgaatttaagcgtaaaggagaaaaaattttcagaccgttttttacaggcgcgctttcgtcgccgtgcaggacatttttgctcaaatgtaatcatgaaagctatgttttgtcagtttcgggagaaagcgtttcaaaatcgtcatttgtcacgccttttgataatgtcgttgtcttcgaagaaataaaataa

SEQ ID NO: 2154 - DNA, 690 bp, Subdoligranulum sp. CAG:314
atgtcaagcgggcatcgaaaaagagcgttttcaatgaaaaaaattgtgtgcgttgtacttgcggttttgtttgtttttgcttttgtcggctgttcaaacggcggtacgttttccgaaaaaaactatttgtcggaaaacgggcaaataaggagcataattattgacgtcgccgacagggagctgaacataggtttatcctccgacggacagataagcgtaaattacttcgacagcgaaaagcaatatcttgaaatttccgtttcggaaagcaacgagcttgtcatacgcttggcttacgacaggagctggacggattttttcggagtcaaaccggacaaaaaatatcgcggaataacggtgcttgtccccgaaaacctgcttgcctcgctcaatgcaagcacgaccaacggggacataaaggtatcctgtctcgacgtttcggaggaaataaatctctgttccaacggaggcgacgtaatttgcgagcgcgtcggcgcgggcgggaagataagcctcaaagccaaaaacggaaacattcgcggcaccgtcgcgggcggcttggacgaattttccgtttcctgcaaaatcaaaaagggcgactgcaatctgccgttgagcaaggagggcggcgacaaggagttttttgccgattgcaacaacggcgacatatacgtcgaatttgtaaaataa

SEQ ID NO: 2155 - DNA, 591 bp, Subdoligranulum sp. CAG:314
atgaaaatcgttgcaactaacaaaaaggcttttcacgactatttcgtcatcgacagctttgaagcgggaatcaaccttgtaggctgcgaggtcaagtctgtgagagctggagaagtaaacttaaaggacagctatgccgttatacgcggcgggcagcttgtgcttgtttccgcatatataaaaaattacgacaagggcagcttttccaatgtggacagccgccgcgacagaaggctgcttatgcacaggcaggaaattatgcggctgttaggcaaggttaaggaaaagggcttttcgcttgtgccccttaaaatgtaccttaacggttcgcttgtaaaggtggaaataggtcttgtaaagggcaagcagctttacgacaagaaaaaggctattgccgaaaaggatgcggaaagagacaaacagcggcagcttgccgatatgaaacggggaattgacaggaaacaaaaaaaatttcagaaagtgcgtcaaaatccttttcaacccaatcaaaatttgatagaatatataagcgtcgtgcaaacgtctcgtaaacgctactgtggctcagtcggtagagcagctgattcgtaa

SEQ ID NO: 2156 - DNA, 807 bp, Subdoligranulum sp. CAG:314
atgaagctgacgggaaaaacggcggttgtcaccggcggaacaaaaggcataggagccgagctttgccgacttttttcgcaagcggtagcaaatacggtttgtcttgcgcgcagctgcggcgagggcgaaaaaaacgggattttttacatcccgtgcgacgtttgcgacgcggcggcggtggaaaacgccttccgcgcaatcggggaaaaattcggcagagtggattttttgataaacaatgcgggcatgggcatttccggctcggtggaaaatacgtcggagcgcgatttcgacagcatttcggacgtcaatttcaagggcacgtacaactgcatacgcttcggtctgccgctgcttcggcaaagcaagggcaggctcgtcaacgtgtccagcgtggcgggggcgattgccataccctatcaggcgttttactccgcaaccaaagcggcggttctcagtctttcggacgcgctcagaaacgaggtgcgcccctttggcgtaaaggtgcttgccgtcctgcccggcgacgtgaaaacctgcttcaccgagtcgagaagaaaaaataccgacgagggagtttatgccgcatacgcggaaaattcggttaaggttatggaaaaggacgagcagcaggggatgagcgccgcctacgccgcaaaaaaaatctttgcctgcgccgtcaaaagaaatatgccgcacgtcaaggtcataggcgtgaaatacaaatttttgtattttgcggcaggcattttgccgaggcggctcaaagattggctgctgttcaaaatttacggcggagagagctaa

SEQ ID NO: 2157 - DNA, 396 bp, Subdoligranulum sp. CAG:314
attatgagatattcggaacagagagaaaaaatacttcttgcggtcaaaaactgttgcgaccatccgaccgcggaggtcatttattcccgagtcaaggcgcagatgcccgatatttcgatgggcactgtgtacagaaatttgcgtctgcttgcggaaatgggcttggttgacacgttggagacaacggacaaaagcctgcactacgacggaaacacggaggagcacgttcattttatctgtacgggctgcaacaaaataaccgatgttttcgtcagagcgaaaattcccgcgccgttgaaggatgacggttatcacgtcacaggcagcaagcagatgatttacggtctttgtccggaatgccggaaagaaaataaaaaatttttacaaggagattaa

SEQ ID NO: 2158 - DNA, 1167 bp, Subdoligranulum sp. CAG:314
atgcttggaaactttacttactgcaatcccaccaaactgtatttcggaaaaaatgctctcgacggactgaacaaggagcttccgcgttacggcaaaaacattatgctcatttacggcggcggctccatcaagaaaaacggaatatacgacaaagtggttgacattctcaaacgcaacggcaaggaaattttcgaggacggcggcgttatgcccaatcccacggcggaaaaactcagggacggagtagagaaggcgcgcgcggcaaaagccgacctgctgcttgcggtgggcggcggctcggtgtgcgactatgccaaagcggtgtccgtatcggttttctgcaacgaggacgcttgggacaaatatttcgacagattcgaggacgttgacaatcccatagtgcctgtcggatgcgttttgaccatggcgggcacgggcagcgagatgaacggcggctcggtcatcaccaatcgcgagaaaaagctgaaaataggtcacgttttcggagaaaatgtttttcccaaattctccgtgctcaatccggagtttaccatgacggtgccccgctatcagatgatttcgggcatttacgacatcatgtcccacatactcgaacagtatttttcggggacggacgacaatacgtcggactatatcatggaaggtcttttgaagtcgctgataaacagcgccgaagcggcggtgaaaaacccgttggactatgaggcgcgcagcaacattatgtggacggcgacctgggcgctgaacacgctggtggcgaaaggaaaatcaaccgactgggaggtgcatatgctcggacaggcagtcggcgcgcacacggacgcggcgcacggcatgacgctttcggcggtctctctgccttactaccgccatattctcacttacggtctcgaaaaattcagaagatacgccgtcaacgtctggaacgtcgacacgcagggtaagacagacgagcagacggctctcgaaggcttggaaaaaatggagagctggatgaaaaaaatcgggcttgtgatgaacataaccgagctgggcgcgtccgaaagcagtataaacgatattgcggacagcgtgctgattatggacggtggttacaaaactctggacaaaaacgaaatacgcgaaatactcaaaaagagtctttga

SEQ ID NO: 2159 - DNA, 396 bp, Subdoligranulum sp. CAG:314
atgcttaaattgaaacaggcggagcttgaagaaataaaggaagtgcgaaaaagcgttttcggcgacgctgattttgacgacgaggggctttgtctgcacgttttggctcgcgacggcgacgaaaaggcgggatgcgtttcgttgaaaaaggacggcgatttcgtccgtatttacgcgttgggagtaaaagaaaacctgcgtggaaaaatgacgggagaggcgttgcttaaaatggcggagtttctctctctcaaccgcgattgcagggaaacgtatgtgactgtcgggcaaaacgagggattttttgaaaaattcggctataaaaaaacatcgggaaaccgtatggagaaaagcctgtttgacggctgcaactgttgttctcacaactccgattga

SEQ ID NO: 2160 - DNA, 1122 bp, Subdoligranulum sp. CAG:314
atggacaagaagcgacgcaacaaaatcagcttcgtcaccacgctgttcggattgattgcaaacgccttgctttgcgcgggtaaatttgcggtggggcttttgtgcggcaacattgccgtcactgccgacgcggtaaacaatctttccgacgcgggcaacaatgttgtcacgctgatagcaatcaaggtggcgggcaagcctgcggacaaggagcaccccttcggacacgaaagggtagaatatgtttccgcgctggtcgtcgcttttattatactttttttgggcgtggagctggcggtgtcttccgttgaaaagataatactcaatttcaaagagccatatctgcccgaatttgacgcgtggctggtttacgttttgtcgttttccgttgtcgtcaaggtcgtcatgtttttcgtttacaggacaaacggtaaaaaagcgcagtctcccgtgctaggagcaatggcgttggacagcattatggacgttgccgccaccgccgccgtgcttgcggcgattcttatcggcagattggcgagcgtcaatcttgacgggtacatgggacttgccgtatccgttctgatatttgtcggcgggataaagatagcaaaggataccgtgagcggtttaatcggggttgcacccgacaaaaagctcattgccgagctggaagccgaaatcgcggcttacgacggcgtactcggcgtccacgaccttttggtgcacagctacggaccttacaatacattcgtcacggtgcacgccgaggtggacgcaaaagccgatatgcttgccgcgcacgagcggatagaccgaatagaaagagattttctcgaaacacgaaacatacatctgttggttcatcttgaccccaccgaaaaggacaatcccgaaatcgaggcggttttgccgtcgataaaggaagttttgtcgtccgttgccgacggtcttaatttccatgacgtgcgacttgtcaggcagggcggcgcggaaaaaatatttttcgatatggttgcgcctttcgagctggaaaagtcggatgaagagcttaaaaatcttgccgaaagccgcctttttgaaaaaacaggcatgagcttttcggttacggttgacagagagtga

SEQ ID NO: 2161 - DNA, 927 bp, Subdoligranulum sp. CAG:314
atgcgcgaatttttcctgaattcgggaatttattttgaagaaaacgtaccgctcaaaaaactcacaaccttcggaacgggaggccccgcgaggtacgttgttcagcccaaggacgagcgcgaaataagcgccgttctgacttacttgaagcaaaacgacgttccttatttctgtctggggggaggcagcaacgtgctggcgtcggacgacggtttttcgggcgtggtgattgttgtcggacggtttatgtctcagatattttttgaaaacggcttgcttgttgcgcaggcgggagccaaggcgtgtcaggtggcgcatttcgcctgcatcaacggactttcgggtgcggagtttcttgcgggaatccccgcgtgcatgggcggagcggcgtatatgaacgccggctgcttcgacagggagatgtccgacgtcgttgcgggagttaaggctgcggacgaaaacggagaaaaggaattcggtcacgcgaggtgcggctttgcgtacagaaaatctgtctttcagtcaaacggaatgattgtcacccgcgttttgttggctctcaaaccggaaaaaccggaaaaaataagggcggcgatgaaggagattttggaaaaaaagaagcttacccaaccattggaatatccgagcgcgggcagcatattccgcgccgagggcggcgcgcccgcgggacttttaatcgacagggcgggtttaaaggggctgcgcgcgggaggagcggaaatttctctcaagcatgcaaacttcattgtgaacaagggcggagcaaccgcaaaagacatactcgagcttatggacgcggcgggcagcgcggtcaagcgcaagttcggcgttgtgctgaggcctgaaataaaatatcttggagacaccgatgatatcgggagattatcatattcattcacgttatag

SEQ ID NO: 2162 - DNA, 606 bp, Subdoligranulum sp. CAG:314
atgaatttacccaacagattgtctttgctgcgaatagctcttgtgccggttatggcggtgtgtttttacataaatttcgactacggagctttgcttgcggtagcggtgtttcttattgctgcatttaccgattttctcgacggttacattgcaagaaaaacaaatcagattaccgaacttggaaaattgcttgaccccgttgccgacaagcttttggtggcggtggcgctttttatggcaacaggcgctcgcgtgcttgaaaatgagtttattccttattatattacggacatctgcgcgtcaattattatcggaagggagctttttataagcgttttcaggcaaattgcagcagctaagggctttgtaatgcaggcgaatgtttacgggaaaatcaaaacagttgtgcaagatattgcattgccgctgatgttgtttcttaaaatgaaggatgtgattatcggatggtcgcagactttttacgacgttgtattctacaatgcattgggattgttgattttggcgacaatattaactattatttcaggcatagtatatatttgtcgcaacaaaaatttgctgagagcggaagataaaaaatgttaa

SEQ ID NO: 2163 - DNA, 369 bp, Subdoligranulum sp. CAG:314
atgaagtcgttacaagaactcaacgcaatcagagagagaatgcaaaaacagacgctcaacagagacgccgcgacggaaaattccacgcgcgtggtggtgggcatggctacctgcggtatagccgccggcgccaagccggttatgagcgcgtttctcgaagaggtttccaaacgcaatttaaagcacgtcgttgtgagccaaacgggctgcataggcatgtgcaagctggaaccgattgtagaagtgttcgtaccgggacaggaaaaggtgacttacgtcaaggtcacgcccgaaaaggtgtcgagaatagtcgccgagcatattgtcaacaatcagcctgtaaaagaatttacagtagatgagaaataa

SEQ ID NO: 2164 - DNA, 747 bp, Subdoligranulum sp. CAG:314
ttgctttttctccgattttgtgttaaaatcaaagaggagaaaaatttattgaaagtttttgcaatcagcgatttacatttgtccactacggtaaacaaacctatggatatcttcggacctaattggagcaatcatttccttgcaatcaaggaggattgggaaaaaaaggtatccgacgaagacgtagtgcttatgccgggtgatttcagctgggcaatcaaatcggaggacgccgaaagcgatttcgcattgttcaaggagcttaaaggcaaaaaggttattctcagaggaaaccacgatttttggtggaacacgataagtcaggtaagagcaattttaccggaaggctttttcgccatacagaacgacgcgttaaagttcggcaacctgattgtttgcggttcgcgcgggtgggttttgcccgagcctaacagaccgcttaatgaacgcgacaacaaaatttatttgcgtgaaatcgagagaatcaagctgtcgcttgccgctatggagaaactgcggcaggagggtgaccgtgtgatatgtattatgcattatccgcccttcaacggcaggcgcgaggaaagcgaatttgtcaggcagttgatactgcacgacgtggacacggtcgtatacggacatctgcacggcaaggaagtcagaagcgacttgtttgtcagaaaattcaacatgaatttctggttgacttccgccgatttggtggatttcaaattgaccgaaataatttga

SEQ ID NO: 2165 - DNA, 312 bp, Subdoligranulum sp. CAG:314
atggcaaaagctaaaaaaactcagaaggcggccgaaccgagaattatgaacggtcaccttgtgaaggaagccaaagctcctctttacaaggtcaagcacgccaaaggcgacaagccttaccaactcagcgacaaaaaaatcaaggtcacgcttgtaaaaagcactatcggctgtttgaaggtgcagcagaggacggttgaagcgttgggactcaaaaagattcgctcttttaaaattctcaacgacaacgacgccgttcgcggcatgattttccgcgtgaagcatcttgtgaccgtcgaggagcttaaatag

SEQ ID NO: 2166 - DNA, 855 bp, Subdoligranulum sp. CAG:314
atgcacatacagtggtttccgggacatatgaccaaatcattgagaatgatggaggagagcgtaaaggttgtggacgcaataggttacgtccttgactgccgtgctcctttttcttgtttcaatcccgctttcggtcagtacactgaaaaaaagccgtgcgtatttctgttaaacaagtccgaccttgccgacgaaaagaccaccgacaggtggcttgcatattttgcttcaaagggagacaaggcgattgccttgaacgcaaacgaaaaggggtgcgcaaaacaggtggtaaaggcattcgattcgctggaaatgaaaaatgttttgcgtttaagacaaaaaggagtagtcagacccgtcaggataatgattatcggcgtgcccaattcaggtaaatcaagcatcataaatcttttgagcggcaggaaaagcgccgttacgggaaacaagccgggcgtgacgcggggaaagcaatggattcgtctcggcgacggcttggagctgcttgatacgccgggcacgttgtggtcaagattcgagaaccaatgcgtagcgcagaatctgttttttatcggaagcataagcgacaatgtcgtggatttgtgcgagggggggcaagcccttctcgacaggctcacagaggtggctcccgacgctttgaaaaaccgttacaaattgacggacggggatttgagagacgaaggattgatggataaaatttgtatcaagcgcggctgtctaaacaagggagagcctgacagggaaagatgcgccgccgcgattatcgacgatttcagaaaaggaagaatggggcgcgtgtctctggaagcgccgcaagcggaagatgaagcttaa

SEQ ID NO: 2167 - DNA, 1254 bp, Subdoligranulum sp. CAG:314
atggagtttatgaactgcctggcaaccgctgccgaaaccatcggacaatggggattttccgaaggatttgcgagtatcatgtcggaaatcgaaaatcccacgtttgtcggctggctggtcaaagggttgctcgacgcggtggggaattacggctgggccgtggtgctttttaccgtaatactcaaaatcattactttgccgctggatttctggcagcgtttttccatgaagaaaaacgcaaaaatgatgtccgagcttgcgccgattatggcaaagctggacaaggcttacgccaacgacaaaaacaagctcaatcaggaaaagcagaagctttacaaaaagcacggctacaatatgctttcgggctgtctgcccatgattgtgacaatgacaatcttttttgtcatgttcggcggtctcaatcaatgttccgcttacgtcaacctcaaggtttacagcgagcttagcgtgcactacaccgatacgctttctgccgagctgtcaaagcacacggaggaatacgaaagcaagcgctatgacattttgctttcgggaaaatcgacggcaatcgaggattacaagacgtggctgggcggtcagggcgttgcggaaagcgctttcgacgcggaaataagcgcggcgacaagccgtatttcccaaatcaaggcggaggcacaggcggaggcgcgcaaagcggtgggagagttctatctcgaagcaaaggagggctttttgtggattaccaacataagccgtcccgacacttgggttgagtcctttccggaaacggcggaaaagtttaccggcacgctcacaaagaaatacagggcgtacaaggacgaattcgactccgagctttacggcgaaatctacaagggcataagcgaacagggcgtaggctacaaggtgggcgacaagcattggaacggtcttatgatactgcccgtgctgtccatagctctgagctttctttccacgtttatttcaaacaaaacgagcaaaaagaaaaacgaggaggaacagcagctcgaccccaacgcggcggcggctcagagcagcaacaaggtgatgatgttcgtcatgcccgtcatcatgggtgttttcggctttgtttatacggctacgtttgcgctgtatatggtttgctcgagcctgctgtccattctgtttacgctggcgatgaatcccataatcgacaggcggattgcaaaaatagagtccaaggtggaaaaacccgattacaggagaaaataa

SEQ ID NO: 2168 - DNA, 711 bp, Subdoligranulum sp. CAG:314
atgcaacggctgcggactgcaaaaggagggattgtgcaaatgatagcaatcaaatacgccaagcgttatcctttgtctatgatttcacagtccgatatgctcaacgtaataaaaagaattttgacgcgggcgggcgtaaaggtcgaatattcggcgggcttcaatccgcatatgcttctgtatttttcgcccgcgctttcgctgggcatagaaagcgagtgcgaatacgtttgcgccgccgcggggtacgcgcccgatttgaaagaaaaactcaatgacgcggctccgtcgggtttcgagtgcctcaaagttttttctttgccctgtgaacccaaccttaccgcgaggtcttacgccgcgcattatgtgttcaaagcgcgcggacttggaaagcaggaactttcttccattgcgggaaaccccgattttaccgtcttgttcaaggacaagaacggagaaaaagtcaaatccgccggcgaaaaaatctatatgctcaaagctgtcggcgatgatgccgcggaagccgtccttgcctgcggcaacgacaatctgcgcgcagacagagtgttgaagcagctgtgcgcggatttttctctcgattgggacgccgcaacgataaccaaaatcagactgctgcttgacggagcggaggacgcggacgaatttcttttgaagctgcaaaaaaacgcggccgcagcttgcaaaaattga

SEQ ID NO: 2169 - DNA, 675 bp, Subdoligranulum sp. CAG:314
tctgagacagctgtcgcacatttcttcttctatcggaatgtaatttcttttgcagacagggcaaagctttgtttcctcttcgaggtcgaagtcgtcgtcgaggagtatgtctttgggcataagccccaactcggctttgcatatatcgcacatttcctgcctgctgtcgatataattcaaatcgcagcgggggcatttaatgtaagtaattttgctcataaacctaaaaaacctctgttctcggatttgcctgcatattatatattcaattatccgaattgtaaactgtttaaggcgaatttttttcaaaaaaaatatacggagtatcggaggcaaccgacggcggcgcaaaagagtgtaaaaacgtcgtttttgggcacaattctgaaacaaaactcttttttcgcatatactacatatagaggtgaaaaattgcgaaaagtaacgacggacatcaacattgcgaaaaaaagagtggatatgttaaagggcaaggatttgcttgtgagatacaacaaggggcgcaacaaaatcagttatttcaagggcagaataacggaggcgcacagaaacgtttttgtaatcatggttttcgacgagatattcgacaggctgagctgttcctactccgaccttttgtgcggggacgtggcgtttaaggaaatcaaaagttaa

SEQ ID NO: 2170 - DNA, 1116 bp, Subdoligranulum sp. CAG:314
atggctaaatttaaaaaaactcttgccgcttttgctatgcctgttgtcgcgatgattgccgccgcagtcacctgcttttttgtaccctttgacaagcagtatcttgattatttcgattttcgtacccttgcgtgtctgttctgcacgctagcggttgtgtgcgcttttaaaaatataagatttttcaggtggctcgcggatgtgattgtgcgcagattcaaaacggtcaggggagccgtaatcgcgcttgtgttcgtaacttatttcggttccatgattatggcaaacgatatggcgctcatcacctttttgccgttgggctttctcgtgctggaatcctgcgcgcagagaaaatatcttgcttttgtttttgtcatgcaaaacgtcgccgcaaacctcggcggaatgctcactcccttcggcaatcctcagaatctgtacctgtattccttctattcctattcggcgggagagttttttcgcgttatggctgtgccctttgccgttgcctttatactcattttggcgtcctgtctgtttgtcaagccgttgaaaataaaggctgtttcgacgcaggtgccgcgtccgccgttgttcaagactgttgcgtattccgtactgtttgcagtgtcggtgctcatagtttttcgtgtttttccctattggtgggggctggcagccgtcgttgcggcgttgttgctccttgacccggcaagtctggtcaaggtggattacaagcttcttgtcacctttgccgcgtttttcgtttttgcaggcaatatggcgcgcatagacgcggttaaggaatttttaagctctttggtggcggcttctcctttgcttgtgggagtcgcgtcctgtcaggtgttgagcaacgtgcctgcgtccatgctgctttcccgttttaccgccgacaaaaacgccttgctgattgccgtaaacataggcggactcggcacccccgtcgcgtctcttgcaagtctgattacgcttggagaataccgctccgcaaacggcggcggcgctcggcgttatctcggtttgttttccgcaatcaatttttcgtttcttgcaatcctgacggcggtttcgctgttgattttgccgctgctctaa

SEQ ID NO: 2171 - DNA, 882 bp, Subdoligranulum sp. CAG:314
atgacgacgttaaacaaaaaaaattcttttgcagaatatataaagatatatgccatgctgacacttgcggggacgcttatggcgctgggaatctatgtcttcgtgctgccctgttccgttgtggcggggggaataggcggactgagcaacatcctgtattatacctttaacatacccgtgagcataggcagcatagcgctgaacgcgccgctgctgattgccgcgctgttcaaactcaaaaagtcctattcagtcaggacggttttcgcctgcgtggtttattcgtcggtgacgctgctctttgaaaaaataaatttctttcagttttcggacagcaggattatcggcgtggtaatggggggagcgctttcggctgcggccataacggttgcttactttgccggcggcagcaacggaggcagcgaaatcgtaaccggactggtcagcgtcaaaaatccccacgtggaaatgggcaaggttctgcttatcttcaatctgggagtttacgcgctcgcgtttgcgctgcaaagagaattgatgcaggtgctttactcgctgctgatgtcatacgtgacctccttctgcgtcaaaatttttatgaacgggatagaccccgtgctgaaatacacggtgataaccaaaaaatcgcaggagcttgacgcggaacttttcaaggttttcaagagaggcgccacgaatatagaggtagtgaccgaatacggcgagcctaccgacagaaaggttgttatcgtcgtcatacagtaccgacagaatcaggtgttcaagcgaattttgcgcaaggtggacgaggagtgtttcgcattttgcacttcgataaacacggtgttgaacaagcccgatttcaataagagatacaaataa

SEQ ID NO: 2172 - DNA, 378 bp, Subdoligranulum sp. CAG:314
atgtccaacgcagcggtaaaaagaagtaattcgggcgaaataatcaggggcggactgttgagttttgttttcgccacaatacttgtgcttgtcttttcactgattgtcaagcttacgaatatgtcggcaaccgccgtgccgatagtaaatcaggtaataaaaattttaagcgtatttctaggcgtgtttttctctcttaaaaacaaggaaaaatgctggctgaaaggcattttgtccgctttgcttttcgccgtgctcagctttgtggttttttcccttctcgcaaacagcttcaattgggcgggattcggaattgacctggcaatcgacgcggttgtaggggcgattgcaggcattatttgcggtttgagaaaataa

SEQ ID NO: 2173 - DNA, 459 bp, Subdoligranulum sp. CAG:314
gccgcatattcaattattgcggaaaaatacttgcaaaatttttgtctttgtgctatactgccaaagcattgtattggaggtcaagatgatttcaaccttgttggcggcttctgccggacttattttgggcatcagaataacattgatggcgttgatgctaatctgcgccgtctgtataatagttttcgtaatgcgtcagcacggcgaggaggacggtcttggagcaatcagcggtcagaccgaaacgcaggacagcttttacggcaaaaacaagtccaagagaaaggaaagcagactcaagctgtggaccatgatttgcggcatagtgatagccgttttgagtatagcttggtttgttgtggaattgctggtttgacaacgtacctgacggcagagcttggtttctgccgtttttttattgaaaaaggaaagttcttaaatgaaaatcgttgcaactaa

SEQ ID NO: 2174 - DNA, 888 bp, Subdoligranulum sp. CAG:314
atggaaatttacgacaaaaagtttgtggaactcggcaacggagaaaaatacgcgttcatcgaaacgggaaagggcgcgccgttgctgcttattcacggcaacatgtcaagcggcgtgcatttttcgcctatcttgcccgcccttgccgaaaaatttcattgcttcgcacccgatttgcgcggcttcggcgacagcagctacaacaaacccttcggcagcctgaaagagcttgccggggacgtaaagctgtttgccgacagaatgggcttgaaggaggcatacgtcataggttggtccaccggcggcggagtggctttggagcttgcggctgccgagccgcaatttgtcaaagccgttttttccattgagggagcgagccacaagggatatcccatattcaaaaaagacgaaaagggtatgccgatagtaggcagtctttattcctctcccgacgaaatgggagaagaccccgttcaggtcaagcccgtgagtctagcctttgccgccaaaaactttcaggcgacggacgctctgtggaaagccaccatatacgttgtgaacaagccctctcagaaggacaacgaaatacttataaacgagaccatgaagcaggtttgtctcaacgagctggattggtcgcttgcaaacataaatatgtccgactcgcccaatttttatcagaagggcgacgacacaatcaaaaacgtcgtgtgcccctgcgcgttcacaagcggagagctggacatggtagttccgcgctacatggtcatggaaaacgtaaacgcggtgaaaaacagcaagctcttggcttacgaaaagtgcggacattcgccgcttgtcgattgccccgacagactgataaaggacataacggaattttttgcctga

SEQ ID NO: 2175 - DNA, 573 bp, Subdoligranulum sp. CAG:314
gtgtggactttttgctgttcacacttttttattttttcggaggtaaaggttatcaaagatttacagaccaacgagcaaatcagagacagagaggtgcggctcatcggttcggacggagcgcagctcggtatcatgtctgcgcgacaggcgcagcagattgcggatgacgctcatttggatttggttaaaatttcaccgaattctgttccgcccgtctgcaaagtgatggactacggcaagtatcgttacgagcagaacaagcgcgaaaaggaagccagaaaaaatcaaaaaatcgtggagctgaaagaaatcagactttcgatgacaatcgacgagggcgacattgccacaaaggcgaaaaacgccgtcaaatttttgaaggacggcgacaaagtcaaggtaagtctcaggatgagaggcagacaaatggcgtttgtgggcaacggaatcgaggtcgccaacagcttttacgaaaagataaaggactacgccacgatagaaaagaagcctttggcggaaggcagattcatcaccatggtgcttgctcctgtcgataacaaaaatacgaaataa

SEQ ID NO: 2176 - DNA, 1323 bp, Subdoligranulum sp. CAG:314
atggtacatagctttaaggtaaacgacgaatattttgttttcgactcggagagcggctcgctccacacggcggacagacttgttttcgcgttgctcaatgacaataaggaaatactttcgcaatattccgccgacgaaacggcggaagcgcaggctgaaatcgaagcccttaaagaaaaagggctgcttttttccgcgccgcagacttcggtcgaaggaaattacgaggcgggtatcgtgaaatcgctttgcctgcatttaagtcacgattgcaatctgagatgccgttattgctttgccaatcagggcgactatcacggcaaacgcgaaaatatgcccttgaacgtcgcgcttaaagccgtggatatgctgattgcaaagtcgggcgcggtaaaaaatctggaaatggattttttcggcggcgaacctctcatgaatttcgacgttttgcgtcagacggttagttacgccaaagaacaggctcgaaaggcggggaaaatctttaaattcacctgcacgacaaacggactgctgttggacagggaaaaatccgattatctcaacgaggaaatggacaatgtggttttaagcctcgacggcagacgcgaggtcaatgattttgcccggccgtgtcccaacggcagaggcagttttgaccttattgtcgacaatttccgttattttcgttctataagaggaagcaaaagctattttctcagagggaccttcacgcatttcaacaccgattttgccaaagacgtgctttttatgcgcgagctgggctttgagcagctttcagtggaacccgccgttctgccgcgcggaagcgaaatggaaataaaggactccgacctgccggaaattttcggacagtacgaggagcttgcaaagcaatatgtcaagcttcgcaaaaatcccgaaacgtggtttagcttttttcatttcaatatcgatttggaaaacggaccgtgtctcaaaaaaagacttaaaggctgcggcgccggctgtgaatatcttgccgtcgttcccgacggcggagtgtatccctgccatcagttcgcaggcgaaaaggaatatctgctcggcaatgtgttcgatatgagtcttgacgaatccaagagaaaaatttttgcttcaagcaatcttttttccaaagaggactgcaaggactgctgggcaaaatatctttgcagcggcgggtgctcggcaaatgcggtgcacttcaacggcgacataaacaagccattttctcaggcgtgcgcgctgatgaaaaagaggacggaatgcgcgctttacgtatatgcgaaagagcggctaatttaa

SEQ ID NO: 2177 - DNA, 669 bp, Subdoligranulum sp. CAG:314
atgacagacaaaaacgatatgggaacggaaaaggaacaggaaaaaaacgggacgcccgaaaactgcggcgaagaaaagacagaggctgcgcccgaaacggaagcggagtctgacaagactttaacgcaaaacgccgaagaaatggacgctatggacgagccgcgtcttagggaatacgcaaaagctttgattgacgggttgaccaaggaaaacgagattctgataaaggagcaggcggagcttaaaaagcagatagaaaagggaaactcttatctggatatgcttgccgctttgaaaagcgattttgaaaattatcgcaggcgcaccaacgctcaggcggaaaacagcgaaaaggagggcaggctgttcgtaataaaaaagcttttgcccgtgctcgacaccttcgacagggcgagggaaatgcttgacgaggtcaccatgacgacgttcaacctgatagtcaggcagttcgacaaggtgcttgccgactgcggcgtggaggtaatcgacgtgctggggcagccctttgaccccgccacagcaaacgcggtgcacagtctggaaacggacaaggaagaggaaaaaaacgtcgtgctggaagtttatgcaaacggctatcgctacggcgacaaggttttgagatacgcgcaggtttgcgtcggagtctga

SEQ ID NO: 2178 - DNA, 852 bp, Subdoligranulum sp. CAG:314
atgaaaaaggcactgattactgttatcgcgttcttactcctgttttcgttctgcgcctgctctgcgggggaatttatttccgcctccaagctggaaaaaatcaaagagaaatccggtatagacgcaaatcccgtcgccacgctgacgctgcgctacaccgatataaacgaggaatcgagtggcgaggtttatacggtcgttatcgaatacgagcttcttatcgacaaagcgcccattaccgtcataaatttcatgaatctcattcagcagggattttacgacaacacggtggtggattatataggcgaaagataccttatcgccggcagatattcggaggaggacgacaagtttataaccaaagaatccggttacacgattaagggcgagtttcttgccaacggcttcaaggttgacgaaagcaaaaaggacggggacaacgcgcagcctatgctgggcagtctgattatgttccacaatgcgcagacttccacgaaaaattatttcgacaccgcaagcagcgcgtttttcatggcttttaccaacgagttttcaacggcgacggcggtacccatgtccaaggacaattacgctgttttcgcatacgtcaagagcagccgcatgatggtttccgaaaacggaggtttctatcccgcaggcgggacaggcagctccaattcgacgggtttggcttccaaattcgttgacgatatgagaaattacgaaacggatacgcaggaaacggacggctccgacttgcagaacgctccggaggaaacgattaccatcgtttcgataacgctggacaaggaatacaaaaatcttcccacaagctaccgtaaaaaggcttga

SEQ ID NO: 2179 - DNA, 627 bp, Subdoligranulum sp. CAG:314
atggaattttggtggaacaacatgttaacgctgcaaaaggtgctttttatcgtcgcctgcgccacaactctgattatggttatccaaattatacttatgcttgtaggcgccggctccaacggcttcgaggctgccgatggcgaccttgtaggcggcgcggattttgacggagacgccgatttcgacggaggcagcgacatagctcagagcgacttgggcgctttcggcatgaagctgctcggcataagaagcataatggcgtttctgtgtattttttcgtgggtgggctacacctgcgtttatctcatggattggtggtgggctttgctcatcggggtgggcgccggcgtcgcggcgtcgctgcttgttgcgttgctcatgactctcgtcgaaaggactcagaccgacggcacgacaaacatacgccgtgcaatcggttgcagcgcggaagtttatctgcgcatacccgccgagcgcagcggtacgggaaaaatcaatgttatcgtgcaggaaaaaatggttgaggtcaacgccgtaaccgacgaaaacgaggatattcccaccggcgcggcggtcgtcgtggacagcgttgtgtcggacggtctcgttgtagtcaaaaaacaataa

SEQ ID NO: 2180 - DNA, 597 bp, Subdoligranulum sp. CAG:314
ccgccgatttcggtctttccgcagcgctcaaagcgcttacgggcgtgtcgtaaaaatcggtgggaaatgagcgaaaacaaggaagccaagtggtatattctgcacacctatgcgggatatgaaaatatagtcaaggcaaatctggaacagatgattgaaaacaacaatcttcaagaacagattctcgacataaaaatccctaccgagcagaccatagaggaaaagaacggcaaaaagaaagcggtggaaaacaagacgatgccttgttacgttttcgtaaagctggtttactcctcccagctgtggtatatgctgacatatacctgccgcggcgtcaccggctttgtcggtccgcagggcaaggcatggcctctcgacgaggacgaggtcagacggctgcgtctcgaagaggtcgttgtcgatttcgatatggaaatcggagacagcgtaaaggtggtcaacggacctttcgagggacttatcggagtgataaaatcaatcgaccgcgcgcaccaaaaggtgggacttgtgctcaatatgttcggacgggaaaccgccgtcgaaatggattttgtgcaggtcgaggcattgaaatag

SEQ ID NO: 2181 - DNA, 594 bp, Subdoligranulum sp. CAG:314
atgctgggattcgttagcggaaaggtcgtttcgatatacgagggaacggcggttgtcgaaaacaacggtcttggtttcgagcttgccgtttcgtccaacacgcttgacagtcttaaaacgggcgcggacgttaagctgtttacttatcttcaattgagagaggacgggcttacgctattcggttttgcaaccgtcgaagaaaaagagatgtttctcaaactcatttccgtttcggggattggtcccaaggtagccctgtccgtgttgtctgggcttaaaatgtccgacctgtcttccgcaatcgtcacgggagatatagccgtgcttacaagcgtaaaaggtctcggcaaaaagactgccgagagaattgttctcgagcttaaagacaaagtagacgtgtctcgcgaagcattcgtaaacgtatcgcccgccgccaaaggcagtctgctttcttccgaagccaacgaagccgtttcagtgcttgtttcgctcggactgagcagacaggatgcggcggcaagaattaaaaacgcgtcggaaaacggcgcggaaacaacggaggaattgctttcctacgcgcttaaaaacagctga

SEQ ID NO: 2182 - DNA, 960 bp, Subdoligranulum sp. CAG:314
atggctaaatacgagctgattgcggacataggaaccgattttgtcaatatgtctttgaaaaacgcggattttgttttgcgggagcctgcgctggttttggcggacgcccgcaacgaaagcgattttctttccgcgggacttgccgccaaaaaggcagccgactcggaaaactcgaagcttgtctatcctttcgccgagggctgcgtcgcggacaaaaaagccgccgatttttttctgcggaaggcaatggaaaagcttctgccgtccacggcgtttccccccagagtggacgtttgctgtcttgtgcctgtcggctcgggcaacggcgaaaaaaaggttctggaagaaattttcaacaatataggcgtcaaatcggtcagattcaaagagtccgtgcttgccgccgccgcagcctgcttcaaggagtttgacaaaagagcgggaattgtagtggacataggctcctcagtgaccgaccttgcggcggtgagagaggacaaaatcgttgcgggctgttctttttatatcggaggagcgtattatacgcagcaaatttccgattacgttctgaaaaaatacgggctgcaaataacctttgccgaggcggaaaagctcaaactcaaatgcgcgggactttatcccaacgacgtttctttcggcacggtggcgggactcaacataaacaagggcgcagcggaagaaataactgtcaccgcgcgggaaatttacgacgttttggcagctcttaccgacaagctgtgtcaggtcgtgacaagccttttgctcaccgttcctcaggaaacgagcgcttatttcaaggaaagcccgatttttctctgcggcggcggcgctcagctgtcgggtatggaaaaatattttttcgacaaaatgaatatgggcgtgcttgttccgtcggacagctttctcgcagcggtaaagggcgccaagctccttttgtga

SEQ ID NO: 2183 - DNA, 1071 bp, Subdoligranulum sp. CAG:314
atgagtatttggtgggtaataattctgtttttattgggtcttgctctgattatcaagggcggcgatttttttgtcgacgcggctacgtggatagcggaggtttcgggcgtgccgaaattcgtcataggcgcgacggtggtaagcgtagccacgaccttgcccgagcttcttgtttccattatagccacggcggagggaaatcttgacatagcggtaggcaactccgtcggctcggttgtcgcaaacatcgggcttattatgggcatatcaatggtttgcctgccttcggtgatgaaacgcagggacctgctcggcaagggaatattgcttgttgctagcataaccctgctatggattttttcgctgggaggcaaccttaatttttgggaaggaataatagtcctgcttattttcggactgtttatttttgaaaatctccgcagcgccaaaaagcacgaattgaagcctttgccgacatcggagggcgcggcggagttttctgcggacgctcaaaacgtgtttgccgaaacaaaggtcggctccgacggaggcgaagcgtcctctgcgggcggaggcgcggcgggcgtcaagcgcgacaagcgcactataacgataaatattctcaaattcctgttcggtacggctttcatagtcgccggcgcgcagctgcttgtaacctacggcagcgagcttgccgtgcgcatgaacgtgcccgaaagcataatcgcggtcaccatggttgcaatcggcacgtcgctgcccgaactggtgacgacaatcacggcaatcgcaaaaaagcaggcgtcgttgtcggtaggcaacattattggcgcaaacataatagacctgacgcttattctgcccgtctgttcgtttatcagcggcagaagcgggcttgacataaacgcgcagacggtgtttctcgatatgcccgtatgtctgggattcgtgctcatttccgtcgtgccgtcaatgataacggggaaattcgcgcgctggcaggggattaccttgcttgcgctctatatcggctatattgttgttctgagtacgggtgtgctgggcttttga

SEQ ID NO: 2184 - DNA, 1530 bp, Subdoligranulum sp. CAG:314
ttgacaacaaatcgcaatgatttacagggggcaaaaattatgctggaaaagaccatgggcaattttacatcaaaccgtttcgtaacgctggacaaatctcagctcatcatcaacgcgctgcttgccgcaaaggacgacgtaaaggaaattctcagcgtggacgtggagccgcaggtgacttctttcgagccgcttaacggagaggctctcgtatccggcagggtgaatgtaaaggttcttaccaaagacgcggagggcgcgctcaacagcctcaattacaacgccgatttttcggacagatacaaaaacgagcttatcgagccaaacagctctcttacatttgaagcggacgtggttgacgcaaacgccgccgtcgaaaacggagcgataaaggtggaaatagtagccgacttgaacggaacccttactgaaacggctcagaactcctgtctgtcccgcgccgagggtatatacgtcaaggaggacgtaatcacggttggcagggttgctgcgactgtttcggacaattttacagtttcgggagaggcggaggtcaaatacggcatagaaaaggtgctgctcgcgcaaagcgacgtgtgtcttgcgcatgcggaagctcgcgacaatgttttgactctcgaaggggattgcgcgcttgttttgacttacatagccgtcggcggcggactcaaaagtcagctgataaaaataccgttcagggaggaagtgaacgccgaaggcttttcgggcgagggagaaataaacgtcttctgccgcgtcagaaatacgagaatacatctcgacgtgctggaagacgccgaaaacaatatatttacggcggaaatcaatattgcggtgcgggcgcaaaacatcgtggaggaggacgaggacgtaatctgcgacgcctattccgccacgcacgagcttgaactgtcgttctgccgtgttgcaagcactgtttcttacggcatgaccgccgcgacgtttaattcggcgggagaaatatccgtgccgggcgacgccgaaatcacaggcttctgcggactcaaagccgccgtgacaagcgtcagacctctcgacggcaaacttacgcttgaaggcgtgctcaccggaacgctgcttgcttccggcgggggcgacgcggcttatccgtttgcggtgcccttcgtgcacaccgtagaaaacgacgatataacggaaaatcttgtagtcagggcggacgcggcggtaaccgagtttgaataccgtcagggcagaaacgtcagcatgaatttcacggtctgcgtttcggcgaacctgtatcgcaacatagaagaaaactgcgtagccgacgcggtagagggagaggagctttccgaaaccatgggggcaatagaggtgtgcatagcaaaggcgggcgaaacgctttggcagatagcaaagagtctgcgcatgagcaaggaggatatcatggcagccaatcccgagcttgtgactcctttggaaaaggacgaaaaattagtcgtttatcattgtattgcaaaggactga

SEQ ID NO: 2185 - DNA, 942 bp, Subdoligranulum sp. CAG:314
atggaaaaagaaaacaaaattgttctcaaaaacgaaagaaacgggcacgtaaacaagctggtaaacgaattgggcagctggggctttttcaaggttatttaccgcaacgatatgctgaaaattctcggcatgaacatactcatgctgattttattcgtgcctgtcggttatcttgcttacagatatcttatacaggtgtcgcagtttacgtcacgactgcccgttggcaacgcaatcggcttcggctacgcgccgtggcttggcgtcggcgctgaaatatcaagactcacaaatcttgccatgtcggagcttttgctgtggatgctggcagcaggcgccgtggtagggctgtcggttgccggcggcatggcgataataagggattctttctggacgggccgtctcaaggttttcaaggccttcgggcgcggaatcgttgaaaacggcgttgcgtgcgtcgtttgctttgttctgcttgtgggctgtgtaaacggcatttaccacgcctccgtcgccatgagggcttttcccgcatgggcaagcgttcttttgcaggtggttatgtggcttgcgttggcttttctgacgctgtatgtcatgacctttttaagcgtcaattccacatacaagcaatccgtgggagtaaatttgaagagtgcgtggcatatactgatgcgctatatcgtatcgacgattttcaaatttatcattgctttgcttcccgtagcgttgcttttgctcaccttcggcaatgtaatattctcgtttgtcatagctgttttcgcaatcttcggtttcttctacgtgattttcgtatggcagagccacatgatgattattttttccatttacaatccagtggaaaaaatcaagattgtaaaaagaaaaacgcagcagcccaaggctcaggccgaaaacaaaacggaaaatcagacggcttga

SEQ ID NO: 2186 - DNA, 510 bp, Subdoligranulum sp. CAG:314
atgcaaagaaaactaggaaaagccacggatcaaaggcttgctttattgaaaaatcaggtttcctacctattgtggaacggcaaaatagagaccactctggcaagagccaaagaggtgcagaagctggctgagaaaaatctcacgcttgcaataaatacgtatcaggacgtcgtgaaggtacagaaaaccaaagtagtcaacggcaaggaaacaaaggttgacgtcatcaacgacggtcccaaaaagcttgcggcaagaagaaagctcatctccaatcttgtcgacattcaggaaaccaaaggacaaaaggagagcaagagcgcttacaatctgagaacaaaggacatcaagatgcctttgatagaaaagattttcaacgtttacgctcccaaattcgcagagcgctccgaacaaatcggtcagaagggcggctataccaccattcacaagctgggtatgcgtcgcggcgacgctgcggaaatggcaatcatcgaagtattgcccatctga

SEQ ID NO: 2187 - DNA, 558 bp, Subdoligranulum sp. CAG:314
atgaaggattcggcaaaacggatagcgcttgcggctttgttcgcggcgctcgtttccggcggcaagctggcgcttatgttcatacccaacgtagaggtggtgagcatactgcttgccgttgccggatattgtttcgacgcgcttttttccctgtcggtaagtcttgtcttctgcacggtggaaactgcgctctggggcttcaacacctgggtgattctttattttgtctattggccgcttgtttccctgcttttcgggcttatcggcaaatcgcgccttaaaaacaggtgggttacggcggggcttgcggcggctatgaccttttttttcggcgtgctgtcaagcgttatcgacactctcattgctttcggcggcggaggctttgtgttcaacggcgaggatttttttctgcggttcggcattctttacgcaaggggaatcgtattttttgcggtgcacattgtatccaactttattcttttcgcactgctgttcagaccgctgtgcgagttggtgaacaaacttaaaataaaaatgtttcccgaggagtcgctgtga

SEQ ID NO: 2188 - DNA, 597 bp, Subdoligranulum sp. CAG:314
atgtcttgcggaaaagtcaacagaaacgcgcgtctgacgacaccgcaaaaggagaataatatgcaggaaaaagattttgtgtcctacgaatacaggacaaaaacagtcaaaagcaaggacatgacaaaggcgacggatatgtacgaggccttcggttgggaagtgacctccgcggcccatacagccgtcgacaacacgactctttctttaaaacgcgacaggaaacaaaaacacaagcaggagctttcgcgtcttgaaagacaggcggaggaaattttcggcacgataaacaacttgcagcgcgcaaaaaccttgggagcaagcgtattctcttacattttcggctgcatcgctgcgctcttgctgggcggcggaatgagcctgattatgctaaatcaaaacaatttcgccgcgtttgtcggcggaatcgcgcttggcatcgcaggcattgcgctgtgctgcgtaaattattttatttacaaaaaaatggtcgaaaagaaaaccggagaactgctgccgatcatcgacgacaacgaagaaaagcttgccaatattctcgaaaaaggcaacgacctgcttaaagccgacttaatctga

SEQ ID NO: 2189 - DNA, 849 bp, Subdoligranulum sp. CAG:314
atggcaggtctgaaattcaggattttaaaaagcttctggcttctgctggcattttccctgtttatcaggcaggcgtatatcttcggactttacacattgagtgtgctgatacatgaatcggcacactactttgttgccaaaaaatgcggctacaagtgcaattgtatagcggtttccgccttcggcgccgtcctgtacggcgaattcgacagcgttgacaaccgagacggcgtcaaaatcgcgctggcgggacctgcggcaaatgcggtgtgcgccttggttttcgtagcgctttggtggatgtttccggcgctttacgttttcagtcagccctttgtcgccgcaaacgtctcgctttgcctgataaatctgctgcccgcctatccgctggacggcgggcgcgttttcgtttctctgctttccgcgaaaaccgattacgcaaaagcgttgaaggtaagcaaaatcctttcggtggcgctgtctggcgcgctgttttttgtttttctgtgtatgtgctttgcgggcgtgcccaatttttctttgggattgtttgcggtcttcgtcctgtccgccgggctgtccgaaacaaagggcgaaattttcagcaagcaaatagttttcgaggtttacaaaaagagattggacaggggagtggaaaaaaagacgctggtgttttcggaggaggcgacgcttaaaagcgttgccaaaagaatgtcgcaccactttgtttatcggatagaggtggtggaggcaaaggacggagaggtaaaaaaagtcttttcgcacgcacagttcctcaatcttctttcctcccatgcgcttgacactccgttgaaagagttgttataa

SEQ ID NO: 2190 - DNA, 627 bp, Subdoligranulum sp. CAG:314
atgaaaaacaaagaatttacgctgagcatcttccgcaacgaccccaccttcgccaacacggacaaggaggatttgcgaatccgcagaacaaaaacctttctcatgcaggcgttgataagactcatggaaaagcagagtttcgagcagataagcgtaatagacatctgcaacgaagcgcttgtgcaccgagccaccttttacaagcactacaaggacaaatacgaccttttgaccaacacgctcgaaacgctcaaggtctatattttcgcggataacgcaagcgagcgcgcatatttaaacgacaaggagctgtttttgaacgtggcggactgcgcgctcagctttttcgaggcgcaccgcagcacaatcaaaaacgtgctcaaccacaacaagaacgaaaccatgctggacatgattttctacaccacggaaaagacgcttaaacgctttatcgagtgcagaatcgagcagactcaaaagacgccctccgtgccgctgcccgtcatagtttcctttttttcgggcggcttttcctctctcattttgtggtggataaaccacgaggacgtctgcaccaaaaacgagattttaagctacatcacacgccttgtcgaagcgcggatttga

SEQ ID NO: 2191 - DNA, 867 bp, Subdoligranulum sp. CAG:314
atgagctggcgggttgtagtggtaaggggacgttgcaagctggaatacaagctgggatatctcgtctgtcgcggcgaagaagtcaaaaagttgtttcttaacgagatatcctcgcttgtggtggagtctaccgcggtttctttgacggctgctttgttgagcgagttaatcaaaaacaaagtcaacattttgttttgcgacgaaaatcacaatccggtttcacagctgttgccgctttacggaagacacgattgcagcggagttttgcggcggcagctcaattggaaagaagaacataaaagcgcggtgtggacggcgattgtccgtatgaaaataaaaaagcagatggaatttctttccgaactttgctgtcctcagagcgagcttttgaaaagttatgtcgacggtaccgaattgaatgacagaacaaaccgtgaaggacacgcggcaaaggtatacttcgacgcattgttcggattgagctttaaaagaggagacaaaacctttctgaacggggcgttgaactatggatataccattttgctgtctgcgttcaacagggaaatcgcgggattgggtttcaatacacagctcggattggcgcacaaaagcgagttcaatcaattcaatctgagctgtgatttggtggagcctttcagggtgattgtggacaaagcggtgttcggaaaggataattgccaatttacgccggatttcaaacgatacctttgcgatattctcaacagagaaataaagatagacgacaaatattttgttgtaaacgatgcaatcggtatatacgccaagagcgttttcaacgcgttggaagacggggatacgtcaaaaataaaggaatatgagttttag

SEQ ID NO: 2192 - DNA, 837 bp, Subdoligranulum sp. CAG:314
atggattggcaaaagctttggaacgatataacaacttttttttcaaacaattggcttaacatgatttggttcgtgctggcgcttgtgctcggtataattttgattaagattatatgcagcttgctttcaaagggacttgcaaaaaaaatggaccgcattgtgagcaattttatcgtggtaatcgtcaagttctgtctgtgtatggtgcttgttttcgtgcttgcgggcatcatgaacatcaacacgacgggacttgtcgcggtcatcagcgccgcgggactcacgctgtcgctgtcgttgcaggacagtctcagcaacgtggcgagcggtatgctgattgtgtcgcaaaagccttttaaggaaaaggattacgtcgaaatagacggggtgggcggtcagataacgcgcataggcgtgtttaccacggagctggtcacgttcgacaaccgcaaaataaccctgcccaaccgctccgttacttcaagcccgatagtaaattacgacgctatgcccacgcgccgcgttgacataaagttcaaagcttcgctttcttgcgagattgacaaaatcaaagccgagtcggaaaagattatttacgaggacccgagaacccaaaagggcagcttcaccattgtggtggacaatctcgacggcggcgtcgcctttgtcatcaagtattgggtagatacggcggattattgggacagcctttttcttaacaacgaaaaaatattcaagatgcttcaaaagctggacgtcgcgctaaacgtgtcggcggtgcgtcttttggaggacaggctttccgaaaagaaagacggggacaagacggcgttctga

SEQ ID NO: 2193 - DNA, 894 bp, Subdoligranulum sp. CAG:314
atgaaatatgtgcttttttctctttcttgcaacgaaattcgacaaaaaacgagaaaattgtacaaatttagcgttttattttgtacaataacggtagacaagcgcaaatcgtatgtgttatactttatcacaaggaggccgatagaattgaaaatagctttaatcggtgaggatacggaaagcaaagccaaaatcagggaatattttgctcaaaacaatgattatgaatttgtgtttgacgaagcggacggctacaaggcgctgcaatatttcgacgaaaacgacgttgacgtggtgataacgcccattatgctgcccgaattgaatgcgttcgacttgatggagcatttcagaaacaaaaaatccatgaagtttctgattttgtcggaattgaagtcggaggcttttatgatgagatgtctgacaagcggagcggcgggatatttgttgaagccggtcaactgcgcggtgctcgccgaaaagctgcaaaatcttcaatcggcaaaaacaacctttacgactacgggcaagccgtccaatctcggcaaaactttggacgaaaagatttcaaacattttcataaccgtaggcatacccgcgcatatcaagggttatcagtatctgcgcgacggcatcaagctggttgtcgaaaactcgcagaaaatcaacagcataacaaaatgtctctatcccgagattgccaaacgcttcggcaccacgtcaagcaaggtggaaagggcaatcaggcacgcaatcgaggtcgcctggaacagaggcaaaatagaaaacatcaacaatttgttcggcaccaaaatttataccgccaacgaaaaaccgaccaacggcgagttcattgcgctgatagcggacaaaatgctgctggacgaaacctga

SEQ ID NO: 2194 - DNA, 1872 bp, Subdoligranulum sp. CAG:314
atggattttttcgacgtaatagtaataggcgcgggacacgcaggctgcgaagcggcagtcgccgccgcaaaactcaaatgcaaaacgctcgtgcttgccgcaaatctcgacgcggtggcttttttggcgtgcaatcccagcataggaggcaccgccaaaggacagatagtaaaggaaatcgacgcgttgggcggacaaatggcgctgattgccgacaaatgcacgctgcaaatgcgtatgctcaacaaaagcaagggcgccgccgtttacagcccgcgcgcgcaggtggacaaaaacgcataccacacagagttcaagaaactcctcgaaagcaccgaaggtctgaggcttaggcagggagaagcggtaggaataaaaaaaataacaaaaaaatcccaaaccctgtgggaggtaagcaccgcggcgggagaaaaattccgctgcgtttccctcgtcgttgccacgggagtctatttgtcaagcagaatcatcgtgggcaagtacacaaaaaaacaaggccccaacggatttgcgggctgctatcggctttccgccgagctgaaaaagctgggattcgatttgagacgctttaaaacgggcacccccgcccgaatccaccgccgcagcgtcgatttttccaagaccgaaaggcaggagggcgacgaagcactgcccctgtcctttctcaacgaaaaagccaacaacagccgagtctgccatctgacatacaccacgccgcagaccaaagaactgattttgcggcacaaggacaaagcccctgtctacaacggctcgataaacggcgtaggtccgagatactgtccgtccatagaggacaaggttatcaggtttgcggacaaggaacgtcatcagatttttttggagccggagggcgaggacacggaggaaatttatctggcggggctgtcaagctccatgcccgtaaacgttcagagagaaatcgtgcgcacggtaaaggggcttgaaaacgctgaaatcatgcgcgacgcttacgccatagaatacgactgcatagaccctaccgaactgaatgcctctctgatgtcaaagcggcacacaggtctgtttttcgcagggcaaatctgcggcacaagcggctacgaggaggccgcaggtcagggacttgtcgcgggcataaacgccgcgcggcttgttcgaggcaagcccccctttgttttaagccgcaacagctcatatatcggcgtgctgattgacgatataaccgcaaagggagtggacgagccttacaggatgatgacggggcgcgcggagcaccgtcttttgctgcgtcaggacaacgccgacctcaggctcacgccgacagggcgcgaaatcgggcttgtggacgacgaaagatacgagaagtttatcggtcgcttaaaaagattggagggcatgaaaaagactgcggaaaaaacgctggacgcaaaaaccgcaaaccgcatacttttcgaggcgaaggaaaatccgacggaaacgggcgcgacggtttcggcgcttttgaaacgccccgccgtgcgcgcggaaatgcttgtaaacgcgggacttttttccgacatacccaaaaacgagttggaaagctttgaaacggaaataaagtacgcggggtacatcgccaaagcggaagcgcagatgaaatcccaagcggcgctggaagcaaaaaagctgccgcgcggaacggactttacgcaaatcaaaggccttaaaacggaagccgcgacaaagctcaacaaaattatgccggaaaatctgctgcgcgcaagcgaaataagcggagtcagccccgcggatattcaggttttgtcggtgtggctggcaataaaatcaagaaacgaaaagaaaggagactga

SEQ ID NO: 2195 - DNA, 288 bp, Subdoligranulum sp. CAG:314
atggagcttaagcagcctgccgcggcaggtacgttggagtccggagacatacttatcgagctggagcctaacgagggcaaggggctgacaatcagacttgacagtacggttgccaaccaattcggaaaaagaatcaaggaagtcatttcggagacctttgccgaaatgggcgtcaaggacggctttgtagacgcgacggacaagggcgcgttggattgcacaataagggcgagagtcaaggcggcgttgatacgcgctcttggcaaggacagaaataaatgggaataa

SEQ ID NO: 2196 - DNA, 972 bp, Subdoligranulum sp. CAG:314
atgatggaaatagaaaaaccaagaatgaatgtcgaagaaaactccgacggcacttatataaaaattgtcgttgagccgttggaaagaggtttcggcatcacgcttggaaacgctttgagaagagttttgctttctgcccttcccggagttgccgccgtaggcgtaaaaatcgacggcgtacagcacgaattctccacaataaacggcgtcaaagaggacgttacagaaattattctcaatctcaaacaaatagcgatgaagtccgacaataccgcacgcgatttcagaaaaaccctgacaatcagcaaggtcggtccctgcgaggtgacggcggcggacatttccaccgacgccgaagtggaaattcttaacccctcgctccatatctgcacgatagaccagggcggtcagctgaactgcgaaatcacggtcgggcggggcagaggatacgtttcggcggagaagaataaggaagtcaacagagagctaaagcttgcgtatcccttgggatatataccaatcgattccatttacgcccccgtcaaaaaggtaaattacaatgttgacgcggcgcgcgtgggacagaatataggctttgacaagcttacgctcgaagcggagacaaacggcgctttttcggggcgcgaaatagtggggcttgcggcgaaaatcctttgcgagcacgttcagatgtttgtggacctgtccgagtctatgggcgaattgggcattctaatcagccgcgaggaagacaagcagcagaagattctcgacatgaacatagacgacatggatttgtcggtcagaagctacaactgcttgaagcgcgccaatattcagacggtaggcgaccttaccagaaagacggaagaggatatgctcaaagtcagaaatcttggcaggaaatctctggacgaagttattgcacggcttgaaagcttcggtctcggactcaaattgaaagaagattag

SEQ ID NO: 2197 - DNA, 519 bp, Subdoligranulum sp. CAG:314
atgcttaacaaaaaaattgcggatatgctcaacgaacaggtcaacaaggagctttactccgcatatctctatctcgatttcgccaattattacgaggacgaggggcttgacggctttgcccattggtacgaaattcaggcgcaggaggagcgcgaccatgcgcttatgctccgccgctatctcatagacaacagtgtgcgcgtaaccttcggtgaaattgccaagcccgacaaagagtacaaaccgcatatgtgtcctttggaggcggggctaacacgaaaaatacgttacgtcgctgattgccgcaatttatcgcgccgcgttcgacgaaaaggatttcaaaactatgcagttcctcgattggtttgtcaaggagcagggcgaggaggagaaaaacgccgacgacctcatcaaaaagatgaagcttttcgggggagattccaaaggtctgtatatgctcaatcaggagctgaacgcccgcgtttacaccgcgcccgcaaacgctgcggattgacgtga

SEQ ID NO: 2198 - DNA, 1119 bp, Subdoligranulum sp. CAG:314
atgacaaaaaattttgacgacgtcaaaaagctcggcttcggtcttatgcgactgccgcaaaaagagggcgtcatcgacgttgaaagagtcaagactatggtggatatgtttctcgacgcgggattcaattatttcgacaccgccttcgcttacgcaggcagcgaggacgcgataaggcaggctctggtcaaccgcgtgccgagagaaaaattttttcttgccaccaaaaacgccgcatggctcaactgcaagaccaaagacgacgcggtggctcagtttgaaacctctttgagacagacgggtgcgggctatttcgatttttatcttttgcacaatttgggagagtcgcgcacgcactttttcgacgatttcgatatgtggagctggattcaggagaaaaagcgcgaggggcttgtcagacacgccggcttttccttccattccacgccgcaagagcttgaagaaatcttaatcgcgcatcccgaagccgaattcgtgcagctgcaaatcaattacgccgattgggacaatcccgcagtgcggtcgagagagtgctacgaggttgcaagaaaacacgggaagcccgttatcgttatggaaccggtaaagggcggaatgctggcaaacccgccgaaaaccgtgctcgacgtgctcaaaggcgcggagccggattcctccgcggcttcgtgggcgctcagattcgccgcggggctggacggagtgctgacggtgctttcgggcatgagcagcgaggagcagatgagggacaacatatcctgcatgaagggcttttcctctctcgacgaaaaagaacgtcttgctttgagccgcgcgcaggaggaaattaagaaggttccgctcattccgtgcacgacgtgcaactattgcgccaaggtttgcccgcagaatatcggcatatcggggacgtttacggcggacaattattttacgctttacggaaacagggatatggcgctctcgcaggcggattggctggtggacaggcacggcagacagcgcgccgacaaatgcgtcggctgcggaaattgcgaaaaggtgtgccctcagcatatagaaatacgcaaagagctgaaaaaatcggtgaaggagctttattga

SEQ ID NO: 2199 - DNA, 960 bp, Subdoligranulum sp. CAG:314
gtgactttttctcagaacgtaaaggaagaaatcctcggcaggctttcagattctttgccgtgctgccgtcttgcctgtctttcggcgctgctgcgcggggcgggcagcctggaaatcaggtcgggcagtctgggctgttcgcttacgtcggaaaacaaaagactgcttgaatttgccggagaaatcgtatattcgctttacggactcaaaaccgaaataaggcgcgaggaaactaaaatcaagggcaacagcctgtggtcggttttcattgcggaggaaaagacgctttccgactgcggacttgcgtcgctgtcaatggagggctatctcaaaatcaacgagggtatagacaaatacatcgtagagcaggactgctgcaaaaacagctatgtcgccgcgctgtttgccgcctgcggctccgtagcgttcagtcccttgaagactctcgaccaaaaggcgggcaacagattcggctatcatttggagttttcgcttacctcccgccgtgccgcagatgacctcgtgtgtcttttggaggaaaaggacttccgttttaaaatagcggagcggaaaaacgtctgggcggtttacatcaaggacagcgcgtcaatatgcgatatgcttgcctatatgggggcggacaaagccgtgctgacgctcaacaatctgcttatcgagcgggaaatcagaaacaacgccaaccgtcagaaaaactgcattaccgccaacatagacaaatcggtagacgcgagcgaaaagcacattgccgcgataaacaaaatccgcgcccgcgagggaatgttcgacaggcttgcgccgcatctgaaagaaatagcggcggcgcgggtggaaaacccgttttccacgcttgacgagcttgcggacaagctcgggcttacaaaaagctgcgtaaaccacagactgcgcaagataaccgaaatagcttcgcgcctgccttga

SEQ ID NO: 2200 - DNA, 933 bp, Subdoligranulum sp. CAG:314
atgtacaagcgtattgcggcaattctcgtttgcgcggcgtccgtcgttttgttcttcctcaatcccgcgaaaaacatacaaaacgtatcgacaggcgtgctgatatgggcgacaagcgttttgcccgccctgtttccttttttctttctttcaaaactactgattgagctggacgctttcggaggactttccactctcctttccaaaccgacgcaaaaaatattcggcgcgccgcccgcggcaagctatatctttttgctgagcgtagtttgcggctaccctatgggcgcaaagctaaccgcggagttttacgaaaaaggagcgttggacaaaacgcaatgcttgaagctcgcaaccttctgctcgacgggaggcccgatttttattattggtactgtcggcggcgtataccttaaaagtgcggctgcgggagcaatcatacttgtttcccatatactcggcgcgcttgcaaacggtctgctataccgcagacgctttgtctcggtttcggaatgcggcagacttatctcacgacaaaagaacaacggcgaaatactcggcgactgtatgcagaattccataatttccgtgctgagcgtaggcggattcgtaactgttttctatatgtggactcaaatgcttttgtcgctgccgcctttgagcggcgcgggaaagcttgttcaggggattgcaggcggattgcttgaagtaaccgccggttgcaaaatactcgccgatacgggcagcgcccctctgacagtcgttttgtgctgctttctgataagcctcggcgggctttgcatttttttgcaatcttcggtgttttacagaaaatgcggcgtcggcagcggaaaaataatgctgttcaaattgactcaggcgattttctccgcagctttttgcgctccgctcacctttttgtttctgaaatga

SEQ ID NO: 2201 - DNA, 963 bp, Sutterella sp. CAG:351
atgacgcggacggatgaaggaaatcagaagaaagcgaaggctggccgatggcagaaaagcgtttttgcgctggctgcgcttctgatgatgtcgtccgcttcgttcgctgatctccaagcccccgaggttcaggatccgatttacgatacgctcaccacgcttcaggaatcgacggaaatctcggttccgaaggcgtcgcttggctccgcccccgagaaggatggcgaggcgagcctgaactcctctgaccgcccgcatgggttcggtctccgcgtgatcaagaccgcggaaacccagcttggaaccccgtaccgcgccggcgctgaaacgcccgggcgcggttttgattgttcggggcttgtgtggtgggtctatcagcagcaggggatcacgctcccccgcgactctgtctctcagtctcacgttgggacgcgggtcgatctcgcggacgcgaaggcaggcgacatcgttgttttcaagacaaaccgcggtcccaacggcttccacaccggcatcatgacggattccgagcactttattcacgcgccgcgttccggtgaccgtgtgcgggagtcggagcttacgggctactgggcgcggcacctttattcggtgcgtcacgtcggaggcctgaagctcgcgaagaataagcttccttcagacgttgaagtggcgacggatgacctcgaagaaaagatcgccgataccgagtcccgcgacgccgcgtttaaccccggccccgcgcttgagtatcaggagaaggcggagcccgcccgggtcgtcgcctcggtccgtcacggcaagaaatccgcgaaggctgagaagcgcgtgaagggatcgaagtctgctaaggtcgcgaaggcctcgcgcgccggcaagacccgcgcctcgtccggtaagaaggtggtggtcgcgaaggcctcctcaggtcacgcgaagggccgccgccacggccactcctga

SEQ ID NO: 2202 - DNA, 687 bp, Sutterella sp. CAG:351
atgaatcagttcgttaagattgcagcggcagctgcggtgtctcttgtctttctgagcggctgctcggaccctgtgtcaaccgtgaaggacgggacgctgccagaattttcaacatccatgaaggttggggacgcgcttgggaagtactccggctgcgtcgaaaagaccgccaagtggtcgaaattttcaaccgatcagattaagagcggagtggaatttacctgcgaactgaagccgagcgcagaactctatgccggcatccgtaaggaagcggttgacgcaaagagcggtgtgcaggtgctgcaggccatggctgacgcgttccgcgcggcattgggtgatggggcttctcagcagcttgatatgtcgaagaatatcgacacgatgatcgcggcgaccggtgtcacgaagaacgagctgaccgtccggttcgcgatcaactctgatgacaagaagaaatttgatctgagcagtgtttcgacgaagttcttctgggggaaagattctgcgaatctcgcgaatccgaaggatagcctccacgcggtttatgataatgtgccgtttgtcgcgaacaccgcaggtaaggagaagactttccgtgaggatctcttcaatctctataacacccgtacggtggcagcgggctctgcaccggcttccgcaccggcatccagtcccgcaaagtaa

SEQ ID NO: 2203 - DNA, 1212 bp, Sutterella sp. CAG:351
atggcagcagataagaagtcaaaggataaggcacctgtccgcgcggttcgcatcgaagaggaacaggagcgtcagaaggctttgaacgcagcccttgctcagattgaaaagcagttcggcaagggttccatcatgaagatggacgacacgagcgtcgcgcaggatatcagcgtcgtgtcgaccggctctcttggcctggatatcgcgctgggcgtcggcggtctgccgcgtggccgtgtgatcgaagtctacggccctgaatcatccggcaagacgacccttacgctgcaggttgtggctgagatgcagaagatcggcggaacctgcgcgtttattgatgcggaacacgcgcttgatccgcagtacgccgaaaagatcggcgttgatctgaagaagcttctgatttcccagccggataacggtgagcaggcactcgatatctgcgatgcgctggtccgatccggagcggttgacctgattgtggttgactcggttgctgccctgacgcctaaggctgaaatcgaaggcgaaatgggcgatgcgcttcccggtctccaggcccgtctgatgagccaggcgctccgcaagcttacggcctcaatcaaccgtacgcagtgcatggtgatcttcattaaccagatccgtatgaagatcggtgtttcctacggcaacccggaagtgacgacgggcggcaacgcgctgaagttctacagctcagtgcgtctcgatatccgccgtgccggctccatcaagaagggggacgacatcatcggtgccgaaacccgcgtgaaggttgtgaagaacaaggtcgcgcctccgttccgtcaggccatcttcgatatttactacggcgaaggcatttcccgcgagagcgagattctgacgctgggttctgaccttgatatcgttgataaggccggtgcctggtacagctacaacggcgagaagatcggacagggcaaggataaggcgagtgaatacctgaaggaacatccggaagtggcgctcgagattgaaaacaagatccgggcgatcaagggggtgaaccgtgttggggaaggcacggtgaaacccgcgtcccctgccaaggctcctgcggcggctgcggataagcccgcggcgaaagcttcttccgatgaagtgccggaggaagagacccgtgtggatgatctggatgaggaagaagatttctctccggatgagctgctctga

SEQ ID NO: 2204 - DNA, 774 bp, Sutterella sp. CAG:351
gtgcaggcattgaaaagaacctatctgattgatatcggcaactcagctctcaagtgggcggaagcgacaacacctcagaataccggcgtaatcacctatggcgacatggtgatgctggccgagcaggtgagagacttttaccggcatcagagaccggaactgatttacgcctgcacagtggctcacagcgtcattgccagtacggttcagcaggtgtgtgagcggacaaggattgagctgctgggaagccagcgggaatttaacggcgcctttcatgtggtcaaccgctatgacgactatacaaagctcggtcctgatcgctggtacgcggcgctgggtgctgtgagcaaacacccggacgagaaccttctcattgttcagatggggaccgcgctgacagcggacagcatcatctgccggggagagggggaatacgaatacctgggcggacgtatcgccccgggaccgaccatgatgtttaagagccttcagcagggcaccgcgagactccatgtgccgagcggtacgtatcagacgttccctcagaattcgagcgatgggatttccaccgggatcacggactgtgttcgcggttttatttccggcggacttgaagcgatgggagaggcggcgaaaccgaagctcgttattaccggaggcgccgctcactattatgagaaagccttcgagcggtatttcccggactatctgatcgaggataatctcgtgatcacgggcctttcgcttcggattcgcagtgaaaatgaggaatag

SEQ ID NO: 2205 - DNA, 615 bp, Sutterella sp. CAG:351
atgaatgctaaaactctgatttttgtaccgctttcgcttgcgttagtgagcgctccggcgctttcgctcacgctcgacgatatcagtacgaagctctccgaaatcaaaaccgtcacggcgaatttcacgtcagaaagaaatctcaaaggcgcctcaaaacctctcgtcgctaagggcaggatggctctcatcgaagggaagggagtggtctgggagcagacatcaccgttcgcggaagagattctcgtgaagaatgagcaggtcgaaatccggcgcaggaagtcaaaacccgaaatcatcacgaagaaatcacagccgcgggcgttcgctttcgcgagcctcatgcggaatctcgccggggcggacgcgaagacgctcggaaactggttcacggtttcctccatcagcgggaacgcctccgggtggaccgtgacgcttaaaccttcgcgcgatccgctccgccaggcgttcgacaccgtcacgatcaagggcggtgacgccgtgacgggtgtctctttcctctcacccacgaaagaccggacccggatccggtttgatgatgtccatgtgaacgaaggggggctcgccgatgccgaagaacggctcagccgctaa

SEQ ID NO: 2206 - DNA, 651 bp, Sutterella sp. CAG:351
atgacgaaacgctattcacggcgggacgcggttctcctgggggcgtttttctcgctttcgatcggacgaaacgcggccgcgtcgaccgaaaagaacacgtggcaggacctcgtgaaggtgccggaccgtctcgcgcgggaagcgggagtcgcgacgggctccgggggctttgagtaccccggcggcgcggggcgggcagtcgcgtacctcttctttgacccccaggatccaaagagcatcaggctcgtccggcgcgtgagaccgtttgtcgggatcgtcgatatcgttttctgcccgatcgcggccgtgaacgcggtgtcccgcgcccaggcggacacgatccttttcgcgcacccgcagtggcggatgctcgaccgccatctgagtctcttcgatgacccgaagcggcgcggaatccgcgaggcggacgacaccgataacgataaggggcagctgtcggtgggtgaggtgagcggcgtgatccaggcgaacaccgaggcgttcactcgggcgatcgatccgctctcctacccgtttggctttatggagaacgcgggggaactcgagctgctcgatccggacatcaccgagtcggagctctcgcggctcttcggggtcgcgcgcgagtcgttttacgggcccgataagtaa

SEQ ID NO: 2207 - DNA, 942 bp, Sutterella sp. CAG:351
atggctaaaaattccgcagaaaaagcgttggaaagcatcccatcgatgcggcttctggtagcggtttgccgtaagaaatcactcacagaagcggcgaaggggctcggactttcgctttccgctgctagtcaccagctttcggtgctgaaggacgccgcgggcgaccccctcttcctccggaccgataaagggctcgcgccgacctccgccatgaaggagctcctcccgaagcttgaatcgatcatcgacgccgtggacgcgctccggaaacccgcggtgtttgaccccgcgaccgcgaaatgcgatatccggatcctcacgtacgacatggggtacctcgcgttcgtgcttcccgtggttccgaggctgcagaccgagtccccggggctccggatcaatgtggattttcttgagagccgcgagttcgccctgaatgagctgcggctcgggaaagccgatctctgcatcaacccggggcttctgaatcagagtgacgtggtgtcgcagccgctcgggaaagtggagtaccgcctcatggtgcggcaggggcatccgctcgaggcgatctatcaggcggaagggcgcgtgacgctggaagaaatcgcccgcttcccgcagttcattccatcgacccgtcagggcggctacaaccgcccgtggctcgatgtgatggcgatgggggctccggtgatcgcctgcaactacttcaatgttcccccctttgtcgtgaagcggacggacgccgtggagtggatcccgtcgccgctcgcggccgaatgggaaggcaccggtctcttcaccgtgattccgctcacgggcgaaaaccgctcagtctttacgtcgcggctcttctgggccgcgcgtgatgagcgggatccgctgaatcaatggcttcggtcactcctcctcagctatgcgcatgatcactacccggcggaataa

SEQ ID NO: 2208 - DNA, 1938 bp, Sutterella sp. CAG:351
atgaagaagcttttcagggaacggaggcatcgccgctcttccggcacgtctgaattcggcatggctgaattcagacggcgggggatctttgccgtcttctttttcggtctctgcttcctgatactcgtcggacgcttcatctggctgcaggtgatctgccacgatcagtacaccacacaggcggaaagcaaccgcaccgtgagcatcccggtgcaggcttcccgcggcctcatcatagaccggaacggcatcattctggcccggaattactggtcgtactcacttgaaatcacaccgactgaaaccgaagagaaactgaatacgctgatcgagcgcctctccaaggtgattccgatttctcagaccgatatccggcgcttcaagcggctgctttccgagtcgaagcgtttcgatccggtgccgatccgtcttgacctcaccgaggacgagatggcgcggttcctcgtgcagaagtggcgcttcccgggcgttgagctcgcatcccgtgagttccgtcagtacccgttcggtcaggtcggagcccatctcctcggctatatgggccgtatttcggagagtgacgcgaagcggatcgagaaggacggccaggaggatctgtaccgcggcgcctataacatcggcaaggtcggtatcgagcgaacctatgaggacgcgctccgcggtcagcccggcttctccgtgctcgaagtgacggccggcggccgtccggtccgctatctggaatcgaccccgtcggtgccgggcaagaacctcacgctgtcgatcgacctcaatctgcagagggtggtggaaaaggcgttcggcgctgaagccggcgccatgatcgcgatcgatccctcgaccggcgaaattctcgccttcgtgagcaagccgacctacgacccgaatctcttcctgaacggcattgactacgacacctggaatcagctgaacacctcgccccggaagcctctcctcaaccgcgcgatgcgcggcatctacccgatcggctcgacctacaagcccttcatggcgcttgccggtctccagtacggtgtcatcacgccctccacgacaatcaatgaccagggcgtgtatgagctcggcgggcacaagttccgcgatgctgcccgggttcataagggcattctcgatctgaagcgctccattactgtgtcaagcgacatctattactacaagctcgcacatgacctcggagccgaacgaatccatgactttatggagccgtggggcttcgggcagctcaccggcatcgatctgcttggcgagcagcagggtatcctgccgaacgccgcctggaaggagaagcagttcaagaagccatggcttgtcggcgacaccatttcgctcggcatcggccagggctacaacgccttcacgctcctgcagctcgcgcacgctgtggcgacactcgcggatcgcggcgtcgctctacagccacacctcgtgagatcgatctatgccccgaagacccataagtcgacggaaatggagtcgacctatcggaaagaaatgccggtgtcgaagaagaacattgaattcatcatcgacgccatgacgaccgtgacccaggttggcaccgctgccggcgccttccgcggcgccccctacatcgcggcgggcaaaaccggcaccgcgcaggtagtgggtatcgcgcagggcgcccgctataacgccgccgccctcgccaaggctcaccgcgaccatggcctcttcatttcctttgcgccggccgccaagcctcgcatcgcgcttgccattctggtggagaacggcggcttcggtgccacagcggccgcgcctatcgcgcgcgccgcgctcgactactggctcctcggcaagaacagccttggtcttcccccgccccagtacctgcgcgatcagacaccgaaaaccgccgcggaggcaaaaccatga

SEQ ID NO: 2209 - DNA, 387 bp, Sutterella sp. CAG:351
atggcatttggtgatccttttgcggcaaatgttgaccgcaaaatgactaagggcgaactgatccagtcaatccgcgctgacatttcaggcgagctcgacgcgatctatggatatgacgcccatgtccaggcaactgacgatcctgtggcaattgcggtgctgagtgacatccgcgatgaagaaaaagcccatatcggcgaactgatgacgctgctccgttatctggatccggatgaagccaagcatttcgcaagcggtcaggctgaagtggctgaaatgtttgagaaactcggtatcaagacggatgaaactgcggctgcggcggagcccgaggctgaagccgctcccgcggcttctaagctaacgattggcagcctgaaggattga

SEQ ID NO: 2210 - DNA, 855 bp, Sutterella sp. CAG:351
atgcttaagcaacgagtcattactgccatcatcctgctcatcgttctggtgggctccatctacctgtcgccgctcgcgttcgccgcagtgatgacctttgccgtggcggcggccatctgggagtggctgaggatgctgggagtcagagccgcgcttccggttgctgcagtaatggggatcgtgctttacgccctctggtgggtgatggggttccggctcaggcctcaggcgctcctcgcgcttacggcggctgatgccgcggtctggttcctgctgacggtcggtctcttccgcgaccggaatacaggtttccgtctgcctgttgcggctcagggcgctatggcggtactgatgctgccgcttgcctggtactcgattctctggctttttgagatcggcagctggcagatggtgatttccgtgctggcaatcgtctggagcgcggatatctgcgcgtatttctgcggccgctttttcggcgggaagattttcggcgatacgaagatggcccccgcgatctcaccgaagaaaacctgggaaggagcgcttggcgcctatattctcggactctgcgtgctgttcgcgattggcattgcgtgcgccggccgggctgatgttttccagtctgtcctgattactgagaccggattcctcaccgccgttgtggtgacgctgctgctcacgcttttctcgatggcgggggatctgcttgagtcagccgcgaagcgtcaggcgggcatcaaggattcgagtaacctgcttccgggccacggcggctggtttgaccgtctggactcctgcgtgccggtgatgccggcagtcgtgctgatcattcttctgacgacgatctcctga

SEQ ID NO: 2211 - DNA, 1101 bp, Sutterella sp. CAG:351
atgacggaaatctttaattccaccgagctgcggcgcgagcttcatccgcttgccgagctgggactcaacaccaaaaacaccgcgcagtacgttctcgatcacctgaaaaaaatcggcgttgaggctcatcggattggaaacacaaatggtgtcctcggcgtcattgattccggcgttccgggaccaaccgtcatgctgcgggctgacatggacgcgctcccctttgaggttgacggaaagaaaacggcaatccacgcctgcggtcacgatggtcacacggcaatgcttcttgaagccgcgagccgcctcgtcggaaatatcaaaaagggcaagctgaagctgcttttccagcccgctgaagaaacgctggaaggcgccaatgtgatgatcaaggaaggggtgcttgatggcgtcgactaccttatcggggctcacgtccgcccgattcaggaccttgaaatcggaacgctctgccccgcggtcaaccacaccgcatcctgcccctgcgatatttatatccacggaaagagcgctcacgcgtcccgcccgcacctcggcatcaactcgatctatgtcggtacggcgatcgtgaacgcgatttcccagattcagctgccccccaatatggcctggtctgtgaagccgacgcagtttgacgcgaatgacggtgccctcaacatcatccccgcttccgctcacctcgggatcgatatgcgggctcagacaacggaactcatgaagcagctgattgaggaagtccgccgcgccgcggaatcctccgcagccgcgttcggcgccacggttgacgtgaagttcgcgacgctctgccctgccgcgaactacgaccccgaaatcacggatgagcttgcggagtgcatccgcgaggtggctggtgacgacaaactcgccccggcctgcggtggcggcggtgaggatttccacttctataagatcgcgcgtcctgagctgaagaacggttacttcggtgtcggtgtcggcgtgacgcccggtcttcataagcagaacatgacgtttgatgacaagctcctgccgctcggcgccgcggtcttcgtgaagttcgcgctccggcatcttggctga

SEQ ID NO: 2212 - DNA, 885 bp, Sutterella sp. CAG:351
atggcagataagaaaaacgatttcaaggcgatctctgaccgcgtgaacaaggtcgccgcgagccaggccgcgaaagcagtgagctccgcccgcgccgtgaaggaagagcggcaacgccttcagaccgaagccgaggaagaactcggcgtcgctggcagcacgagaggcggggacgtgaagaataacctcagcatggagcgtgacgttcggtacacgacgcctgaaggcgcgatgaagtttgagacagcggaccgctcaagctccgctgtcggccgcacgacgaacttcatccgtgaggtggtgctcgaagaccagtcaccgtctgaccacgagaagatcctgcagggactcctctccgcggaagtgaaggatgaaaagggccgcgttgtctccacccgcgggatcaaccccgatattgagctttccgaagactgggaaaagggcggctacccctataagaaccaccttcgccgcaaggtctatgaaaccgagaagttcaagctccaggtggaactcctgaagctgcaggcctgggtgaagaagaccggaagccgggtcgtgattctctttgaaggccgcgacgcggcaggcaaaggcggcacgatcacccgcttcatggaacacacgaacccccgcggcgcgcggctcgtcgctctcgataagccgaccgccgccgagtccggccagtggtacttccagcgctacgtgaagcacctcccgaccgcgggcgaaatcgtgctattcgaccgctcctggtacaaccgcgcgggcgttgagcgcgtgatggggttctgcaccgatgagcagtatgaggaattcatgaaggaagtgccggaattcgaacggttcctcgttcactccgggatctacctcatcaagttctga

SEQ ID NO: 2213 - DNA, 582 bp, Sutterella sp. CAG:351
atggcaatgactgaacttgagaagctcgacgcggggctcccttatgactttatggatccggaagtggatgggagaaagctgcacgcgttttcctgcgcccagaagctgaatgccattccgatgcagaatgcggcggaacgcgaagcagccgtccgagagctttttggttcctgcggcaagcatcccactgtgctgccggtcttcaattgcgacaacgggctcaatattcatgtgggtgatgagttcctcgcgaactacaacgtcacgatcctcgatatcgcgcctgtcacgatggggaacaacgtgatgatcggaccccacacgctgatcacgtcggtggggcatcctctctctcccgctgcccgccgtaagcacatgggcatcgcgaagcccgtcaaaatcggaaatgacgtctggatcggcggcaacgtgacgattcttcctggcattacgatcgggaacaacgtcgttgtggcggcgggtgctgtcgtcacgaaagatgtcccggataactgcgttgtcgacggtgtgccggcccgcgttctgaagaacattgagaacgatgttgaggacgccgaataa

SEQ ID NO: 2214 - DNA, 606 bp, Sutterella sp. CAG:351
atgtggaagaccggaaaactcccggttcccgcctgccagctcccgtccggcaccatcgttgtggatgatgtgccggcagccggcggcgtggggctctacgcccgcgtctcctcggctgccgaaaaggaccgtctgaagcgtcagatgagacggctcgaagtctatgcggccagcatgggctggagcgtcatcgataaggcttctgaaatcgcgaccgtaacaaacgaaaaccgccgcggtctccagaagcttctgaagaaccgccagatccgtacgatcgtggtggaaactccggatcggattcttccgtccggctttgattacctcgatctcgcactgcagtctgacggccggcgcatcatcgctctcgatgaacagttctcggggcacgatgatgagacaacgcttgaggaactcctcgacacgtactgcgcgaagatctacggccggaaaggcgccgccgcgaaagcgaaggctcttatcgcgctgctgcacgagggcgacctcgatatgctgaaggcgtccgaacgggcgtctgaacgagcggccgaacgggctgccgcagcctcagaaacgaaggaagatgagacagaagtgacgttctga

SEQ ID NO: 2215 - DNA, 1821 bp, Sutterella sp. CAG:351
atgacagagatgaaatccgcctctcccggccgcgcgaagaagcgctggtctcttgctgatcccaatatcgtccgtctgctgaagatgctccgcccttataagaagtggatcatctacgccgttatcgcgcttgcggtgaccgccggatcttcttctctgatcgcgatgctgctcgggaaactgacggatatgggattttatgaacataatccttacgtgcttctctgggcgccggttgcgctgctgggtatcaccgtgcttcacggcggctcaacattcctcagcagctactggctgcaggaggtctcgcagtccgtgatggtggatctcagaacccagatgatgaggaacgtcctttactggccggagtccgtctatcagaagtattcaaccggtgagatcgtatcgaagtttctttatgaagcgtcaaacgcgctttccggcgcgtccagtctcctcacactgatcattcgcgatgtgctgcagattgtggcgctcctcgccgtgcttatctggcaggactggcggctcacggccgtaacgctgcttcttgcgcctttcattgcgatcatccttcgctgggtgagccgccgtatgcggcagttcacgaagatgatgcaggagacgatggggtcgatgtcctccggtctcttccagatgattgatgcccaccgcatggtgaagatctacggtgcccaggaacgggaagccgataactttgccaggatcagcgaagagttcaaacgtctcaatatggcgcagcagaaggtggctggcgcggggactccgctgacgcagcttgtcacgatgagcgcagtgtctgtggtgcttgttgtggctctggttcaggcccagaaggggctcctcacaatgggacagttcacgacttacctctcggcgcttctgctcctgatgccttcaattcgccatctctcggggcttaatggctcgatcgccaagatgggcgccgcggctgacagtatctacgcgctgctgggcgagccgcttgaggatgaaggcggaaagaaagagctgaaaagcacaggccggattgagttttcacacgtttcgctccgctatgagggagcgaaggaaaatgcgcttacggatttctcgctttccgtgaagcccggggaaagaatcgcactcgtcgggccctcgggcgccggcaagtcttctgtcattcacctgattccggcgttctggcatccgactgagggaaagattctttatgacgggctggagcagagcgagatttcactccggtcgctgcgcgatcagatcgcgcttgtgagccaggaggtcgtgattttcaacgacacgatcgccgcgaatatcgcgtacggagccccgggagcgacagaggaagagatccggcgcgcggcggacgcagccagcctcacctctctcatagaatctcttccggatggtcttcagacaaaggtcggtgaatccggatccaagctttccggcgggcagcgtcagcgaatttcgattgcccgcgcgatcctgaagaacgcgccgattctccttctggatgaagcgacgagcgctctggatacagaaagcgagaagtacattgaggcgtcactcgctcatctgatgaaggggcggacggtctttattgtggcgcaccgcctctccacgattcagaatgcggaccggattgtggcgatggagtccgggcgtctcgtggaatccggtacgcattcggaacttcttgctaagggcgggctttacgctcacctctacaatattcagttcagtgaaaagagcgctccggcctctgatccggagccggaaaaggaggaaacagcatga

SEQ ID NO: 2216 - DNA, 792 bp, Sutterella sp. CAG:351
atgacatctgagatccgaaaagcttttctctctgacaatctttctgaacagaaagactgggtggtctttgcccggaattcggaagcgggacactcccggcctgaacacgtgcatgacgtggcacagcttctctatgcggaatcaggtgtcatgctcctcgtttccgacggcatcccgcgtctcgttccgccgcatcaggcgctttggatcccggccggcatcccgcattccctcacctttattacggaaacgcgcctccggacgctctacttccccgcggacgcttctaaaaaggtgtccaattcgatccgcgcgatggaggtatctgatctcctccgtgatctgatcgcggagctcttcaggaactcttatccgccgtctgttcagaaacaaatgagccgcctggtgctgagtctcctccatggaacagcacccaccgcggatccgctcccgcttcccacggatcccgtgctccgatccgccgcggaagggatactgcgggaaagccgctgggcagtgccgcttgagacactctgtgatgaggtccacctgacccccaaaaccttcgagcgaaagttcctgaaggacacaggaatgacctttaaggcctggaaatccgctgcccgactctgctccgcgctcgactgtttcgcgaaagggatgtcgatcaaacagaccgcgcttcacctgggattctctggccccggtcccttcagtgccgccttcacgaaattcttcggtctgacgcctggttcactcgttcagtctctcgggaaacaaaaagaccgttga

SEQ ID NO: 2217 - DNA, 954 bp, Sutterella sp. CAG:351
atgaatgacacgcttctccgtatcgcgctcctcctcatcgatacgatcgtcccgatttcgcttggctacattcttcataaaaaaggcatcgtcacccaggaagggacgaaaaaggtcttcacgtttaatgtccgcgtggtctttacggtcctcgcggtgatctccttctggagccttcatatcggccccgcgatcttctgggtgccggtgatcgcgctcgtgatcacgttcctcccgtacttcatcatgatggcggcgacgaaaaagaaccccgatccccgggagcggggtgcgctggtgacggccgggatgctcgggaacaccgggacgcttgggggccttgtctgttacctgcttcttgggcccgccgcgttcgcgtacgtgcagatcgtcgccgtgatccagaacgtgcttctcattacgttcaacttcccggtcgcgcagaagttccacgacatggcggtggcgggtgagggcaaagcgccgatgaagaagcgctcgttctcggaactcttcttcacctggaatcaggtcgcgctgatcgggatgatcgtcggggcggggctctcgctcgcccacgtgccgcagcctgagtggcttcagatggtgtttaagccgctcgtgcaccttggggcctggatcgcgttcctcccggtgggcctgcttctcgacttcgacgcggcgcgccgcgagatgtcgaagacgctgtggctgatgcccctcaaatttatcctgatgccgctcgtcgtctgggcactctgcgccttgctcatcacgaatcccgtgatggcggcgaccttgatcatcgtctcctcctgcccgacggccatcaattcggtgctcacgtgcgcgctctatgggctcaaaaccaacatcgcggtctcgtcctttatgacaagcaccacggttttcgcgctcgtcatgtgcccgatctacttcttcctcttccggtaa

SEQ ID NO: 2218 - DNA, 2445 bp, Sutterella sp. CAG:351
atgtttgaactcgcctggtcgaagctccttgaattctggggcgggttcctgacgcacgcctcggcgctccttcccccgacaaactccatcgcggcgggtatttcgttcgcgctgatcgcggcggtgatcctcgttccgatcatgtcccgggttggactcggcaccatgatcgggtatctgctcgccggtattgtggtgggtccctatggtctcggactggtcgaagaagtcgagacgatcatgaatttcgctgagttcggcatcgtactcatgatgtttctgatcggtctggaactcgatccgaagcgactctgggaaatgaagctgcccgtgttcgcgggcggaccgcttcagatgatcctctgcgcgtttcccttcgcgctgctcctcgatctcgcgggaatgccgtggccggtcgccgtgctgtctggattcgcgctcgcgatgagctccaccgcggtggcggtgcaggagctctcatcccgcagcatgatggggcagcccgtggggcagaaggctttttcgattctgctcttccaggatctcgcctcgatcccactgattgcctcgattccggtgctcgcactcacgatggggagctcagactcaaatggcgccgcgaaccctggcgcgattgacacgctgatccgcgccgcaatcgccctcattttcatggtgggtgtcggacgattcctcaccgtgcctttcctccgctttacgatccggagcggcgcacgcgagatgctcacagcctttgcgctgctcctcacggtaggctcggcctggatcatgcaggccgcggggctctcttccgccatgggcggctttgtcggcggtctgctcctcggcagctcgggtttccgacaccagctggaagctgagatttcgaccttcaagcagctcctcctcggtctcttctttgtgacggtcggcatgagtatcgacatgcatctcgtcatgtcggaacccgtgaaggtaatcctcgcgctcgcgattctcctgatcgtgaagaccggaatgcttttcgccctggctttcgcgatgcggctgaagggcctcgcgaacaaactgaatttcgcggtgtccctttcccagggcggtgaattcgcgtttgttgtcttttcgctcgcgcagggtcagggagtgctctcaaactcgtgggccgccattctcacggtggctgtcgcctgctcgatgggaacgacaccgatcctgatgcagcttgcgtccaagtggctccagcaccgggcgcggcggctggatgatgaagaggatgaccgcgaggaactcgccgcagccccggatctctccgtcatcatcgcgggctacggtgatttcggcgcgatcgtcgcccgaatgctcgttgccatggggattacgccgaccattatcgataacgatccggaccggatccggcaggcaaaacacttcggcaccaaggtgtactacggagacgcgagtcagctcgccctgcttaaggctgccggcgctgatgaggcgaaaattctcgtcattgcggtcggtcccggcggaatgacagaaaagatcgcggatctcgcgcatgaggcatttcctcacctgcacatcattgctcaggtgtcgacgatcgaaaaccatctcgaactccttgcgaaggatattgaggggtatctcgtcaatttcgagcctgcgatcgaggcagcccgctcgtgccttgtgaggctgaacgtgctttcgccctatgaagcgcgcgaaatcggcgatattttcagacgctacaccgtcaaacttatccgggaaatggtggataccggcggcgatattgatcaggcggtcgcagcctaccggtcaaacgatgagacgcttgaatccgtgatgaagcagatacggacgtatcgacgggaacgaatcgccgcgatccgctcgagatccatgcatctcgcggaaactcccgggcctatgccgaaagccgcggaaccttcctctgacgagaaacccacggagcctgctcctccggatcccgcgcaggtgaagaaacaggcttccatgagggaagacgcttttgctgcctggccgcctcttgaagaagaaaaaccgtcagacaaccggacgcctgaacccgccgcggccccggaacccaggccggcatcagaaccgcagccgaccgctgcctctgctgatgcgtctcgcgcggacgccaaaccgcaggataagagcccggaaggaaccgctccggcatccgtcgccgcggctccgaaggctgacgctccggccccggatgaagacacgcttgatccggcgtccgccgcagcgaagaaggctcaggaagaagcgctgaaggaaatcgcgaaggaagccgcgaaggcaccgcctccgaaccccgaggagctccctgtgtccgactacttccggatttataagggcgacactgaacccccggcttccaaagagaacggtaaagcctag

SEQ ID NO: 2219 - DNA, 843 bp, Sutterella sp. CAG:351
atgaccgataccaagtggcggattgggaaatccttcgcgaagtattcgaagcaggcatctgcctcactcgatccttcacggaagagccttgtgatcggcggcagagcggccggggcggtgtctgaggacgacgcccggctgatcgcggagcggatcgaaggcgcgtcctttgacggcgagtcactcgtgatcggcgccgcgtctgacagcgaggaaatgctctccgcgatcctcgcgcttgccgcggccctcctccgggacgaaggcaggattcaccgctggcgcggcgaactcgtggacgttcagatgccggaaggcggtccccgcatcgcggtgctcgagcggagcgcgttccgtctcctcggtcttctcacggtcgccgttcatatgaacggtgtcacaccggacggccggatctggacctcgcagcgctctgacacgaaggacatcaatcctggcaagtgggataacctcgcggccggcatggtggctgcgggcgaaaccccgcttgacgccatgaagcgcgaagcggcggaagaggcggggctcgcgcccgaggactacgagctcgttcccgagaccgtgttcctcacgagccgcccgactgagtccggctggatgctggaacgcgcctactgctacaccgcgcggctgcgtgacggcgtgacgcctcataacgtcgacggtgaagtgcaggcggctgaactcctcgacgcggacgccatggcggagctcattgcccgcgacaaggtgacgagcgaagcgtctctcgccgctctccactggcttgcggcgaaaaccgggaagacgctccccgaaggtttctatcaggcgtttgtctga

SEQ ID NO: 2220 - DNA, 804 bp, Sutterella sp. CAG:351
atggaaaacgttgaaaagacgcaggaagagagagagccggtatcagccgcggaatccttttcccgggaaaaaccggctgcatcggctgccgatgcggcggcagcgccctccctgaaggttgaggccggagacgggaaagctgcgtccagtatccaccttgaagaagatgcgtctgatgcgctgaaaaccgaagcgggaggcggaagcggaatcccgcctgggggtaccgcgggttctcttacggcggtgcccaaaccggagccaaagcctgaaagatcaaatcttccggctgaactccctaagccttctcagcagactcctgaacccaaggggacgctcgctcagctctgggatctcttctgggatacgttccagaaccgctactggaagttttccggccgcgcgaaccgcactgaattctggacgtttttccttggcggtctttttgtgagctcgatcctgaatgttctggcatcccagccttttatcgggttcttcgcggcactagcctctgccgcctggtggatcgtgacgctcgttccgacctggactgttgctttccggcggcttcatgacgccggacgctcaggatggtggatcactgcgccgcttatcgtgatgtgtgcgctttttatcctcttcccgatttcgcttttcttcagtttctttacttttgtggctcttgggccggtctgtttcattacgggcgtgctctttgtgatcgtgctgattttctgcgcgcttcctggagaacggaaggcgaaccgctggggtgaaccgcctgaagatctgcggattttctga

SEQ ID NO: 2221 - DNA, 990 bp, Sutterella sp. CAG:351
gtggtcaacgttaaccgtcgcgcccttatcggcgccgccgcctctgcggctctgttgtcatccatccctcagtcagctctcgcctttgggcagcgcccgattacgatcgtggtgccgtggcccgcgggcggccctctggatgtctctgcccgcattctcgcggacgcggttaagggagacctcggcactgtgatcgttgagaaccggccgggtgccggcggcacgcgcggcgtgagttctgttgcccgtgagaagccggatggccgcacgctcgtcgtcggcgccgtcgcgacccacgcgatcaacccctcgctcttccgtcaccttccttatgacccggtgaaggacttcaccccggtcaccctgatcgctcacgtgccgaacgtgctcgtgatcacgcccgccttccagaagaagaccggcatccgcaccgtgaaggatctgatcgcctacgcgaagaagaaccccgggaagctgaactacgcctccggcggcaatggctccgcgggccacctcgccggtgagctcttcaaggctgacaccggtgtcaacatcgtccacgtgccgttccagggcgcgggccccgcgaagctctccgtgatgagcggccagacgcagctgattttcgataatctcgcctccgccaccgcgaatattgaggccgggaaattcattccgctcgccgtgacaaccgcgaagcgcgcgaaggcgctcccgaaggtcccgacgcttgaggaatgcggcctgaagggcttcaacatttccacctggtacggcctcttcgttccggcgaagaccccgaccgcgaccgtggataagctgaacgccgctttcacgaaggcgctgcgctcaaaggaagtggacgcgcgccttgataagcttggcggcgaagctgctccgaccacgtccgctcagttcgcggctctcatccgagaggaaatcccgaagtacgcgaagatcgtgaagatctccggcgcgcacgtcgactga

SEQ ID NO: 2222 - DNA, 1269 bp, Sutterella sp. CAG:351
atgtccgccaaatcagacgccaatccagaaatcgaaggctgcgcagtgatcctctcctcggaaaggaccgctccgggcatcgcgcctctcgagtcgcttggcctccccgcgctcctcgatggatcccaggggcggaaccgggggcctgaagagaaatccgcgcttgatgcttcaaacgacctcgaagcgatccacgcctggctcgcttcgcgcgcctcaaaccccaacacccgaagcgcttatcagaaagaggctgaacggtttctcctctggtgcatcatggaaaaaaacacggctctcagttcggtaaccgtccctcaggcctctcagtatctccggtggcttgaggatctcgcgcgtctcacgcctgaagcctggagccggaagtggcgggttccggccgcacagtggattggaaagaagagcgaaaggcgggattcccccgcgtggcgccctttcaacggaccgctttcccacacgagccggcgtcaggctctgacagtggtgaagctccttttcagttttctcacgaaaaccggctacctccgcacaaatccctttgatcaggtcccgcagcgtgtccgttttctccccggggaaggtgcgccgaaagagttttctgaccgatcactcacacctgagcagtggagcgacgtcctccggtgccttgacgccatggaggacgggatcgaaaagtcgaggcttgaagccattctcatgatgggaaagggactcggtatgcgggcgagcgaaatgctctccgctacggcggactggatcacgcagcgccggatcggaaacgaatccgtcaccattattgaggtaatcggaaagggggacaaggtccgccgcctgccgcttcagcaggagcatctcgacgccttcaacgcctatctgaagatccgggggcttcccccgatcggaagctgccccaagggaaccccgcttctcgcgaatctcggaaagggaaagcggccgaagaactcgacagacgccctctcccgctccggacttcaccgcatactgaaaaaatttcttgaggaagcagcgcttctcgcggatcagaagaatccgatcgacggcgcgaagctccgcacggcatccgctcactggctgcggcacacctttgctgaaaccgcccttgaatccatgccggtgaatgtcgtgcagacggcgcttggccactcgtctctctccaccacatcgctctaccttgtgccggcggacgcccgggtgatccgggaattcaagaaggtgaagccaatctga

SEQ ID NO: 2223 - DNA, 258 bp, Sutterella sp. CAG:351
atgagtgaaacggaagcccgtctgcacgccgaccaggagatttcggtcgacggcaagtgccccgagcccgtgctgaaaagcgcccgggccctgaggggaatgcagtcaggagacattctgaaggtgatctgcctcgacccggtttctgtccatgacctgaaggcgttttctgatcagacagggaacgcgcttctcgcgcaggaaacggaagaagcggccggagccgttcactacattcattggctgagaaagcgctga

SEQ ID NO: 2224 - DNA, 1212 bp, Sutterella sp. CAG:351
atgacctatgagtttctgggatacatgcgccccgatggacatgccggcgcgagaaacacgcttcttgttctcccgatcaaccggtcgctcaatttcatcgcgaccaatgtctgccggatgatccggggcgcgacacactttgagattccggcagaaacgggtcgccccgcgaaagaccgtgaaacgattgcccgcgtgatggaaggtcttatccggaatccgaatgtcggggggacactgcttctcgcggtgaagccgtccggcgaaagcgcctaccgcaatatgagtgacagccgctttgctgccgcggctgagcagtccgggaagcccttccggatcctatacctcactgagtccggcggtagctacggccttctcggaaaagcgcttcaggcggccagaagcctcgcggtcgaggtctccagggcccgcaggtcgccctgcccgctttccgcgctgacactcgccgtaaagtgcgggacatcagacgcgacctcaggcatcgcggggaaccctacggtgggcaacgcctttgaccggctgatcgactccggcggaaccgcgatgttctcagaaaccacggaaattatcggcgcggagcagctcgtcgctgcccgtgccgtaaatgacaccgtagccgggaaaattctcgccgcggcccgccgctgggaagagaaagcgctctccaccggcgaagatatccgggcaatcaatccgataccggcgaacatcgcggcagggatatcgacgcttgaggaaaaatcgcttggcgcgatcgcgaaatccggacatcgcccgattcaggatgtcctcacctatggtgaagctccgtcggggcatgggctttacttcatggacgcctggatgagttcgctttcgctcccactcgggttcaccgccgccggtgccgcggtcatgatttatcagatgggcggaaacgccatgcctgaaaatcccgcaatgcctgccatcaatcccaccgttgtgtcgccattcctctacgtgaccgggaacgccagagcttttaagcggtctcctgataattttgactttgacgcgtctcctgtcatgtcggggaccgcgtcaatcgaagaaatgggagaagcgcttctcgcccatctgacggacatcgcgtccggcaccgttacgaagatggagacgctcctttatgaggagcagctcgaggtcttcatggaaggcccggtgctctga

SEQ ID NO: 2225 - DNA, 807 bp, Sutterella sp. CAG:351
atgccctgcctcggaatcggttcgtggcaggtcccggagggcaacgcgctcctcaattcgcttagcgacgccattcatgccggctatcgtctgatcgacaccgcgtcgatctatgggaacgagcgtgccgtaggcatcgccatgcggaattccggtgttccccggagtgacttttttctggtcgacaaagtctggaatgcggaccgagggtacgaaaagacactggacgccttcaggaaaagcacggcgcttctaggcacgtcttatctcgacctctacatgattcactggcccgcgactcacgaagagccgatcacctgtcaggcaatcaatgcgggaacgtggcgggcgcttgaaaagctgtatcgcgacggcgctgtacgcgcgatcggggtcagtaacttccttccgcatcatcttgtgccgctccttgcacgcgcggaaatcacgccgatggtgaattcgcttgaatttcatcccggctacccgcagtttcaggcgcttcgcttttcacacgaacacggcatgaaggtgctgggctgggcgccgctcgggcgcggcgcgttgatggaggatccgctccttcagagcatcgccgcgaagcacggcaagacggttcctcaggttgcccttcgctgggcgctggagcacggtgtagtgccgatcccgaaaagcacgtccaaagcccacatcgaggaaaatgcctcgatctttgacttcacgctgccactggacgaaatgcgcgcgatcgacagactgccgctcacggccttcacggggcttgatccggacaccgtgaactactga

SEQ ID NO: 2226 - DNA, 447 bp, Sutterella sp. CAG:351
atgaaaaaattcatatctgctttggttgcaggcgccttgctggctgttgcagcaggacctgcactcgcaggtcctggcggtcccggccccggtccgggctggggtcctggtcccggcccccgctggcatgccgctcctcctccgcctccccgcggcggctggggatggagacatcactattggggcggcggtgactggattcttccttttggcgtcggagtcggtctgcttgctctcgccgcaacccccagccatacaaccagcacggtacccgcagccccggttcagactcagccggccccgccgatcaacgtgacgatcaataacgctcccgcctcttcctcggtggcaactcaggattatttctattgccccgcgcagaagggctactatccgacaattcccagctgtccgaccggctggatcaagatcacgccccaaggctga

SEQ ID NO: 2227 - DNA, 1203 bp, Sutterella sp. CAG:351
atgactgacacgaaagaagaccttgcccgacgcgaagccccgtgcttcatttatgagaaagaggaaattgtccgccgctgcgggcttctcaaagccgcgctcccggatgtccagtttctttactccgtaaaagcgaatccctttgacccggtggtccggacgatcgcgggggagggattcggaagcgacgcggcgtcgtctgacgaagtgcagaaatcgatccgagccggcgtgccgctcgatcggatcttctactccgctccggggaagacagacttcgatatccggtcgtctctcgggttctgcgcctttatcgcggacagcatcggggaggtcggccggatcgcggcgatcgcggataaggcgggtgtccgccagaaaatcgggatccgcgtgaatccggcgtttgggattgggggagcggccccggctccctccaaattcgggatcgatgaggagcagctcccgcggctcttccagatcgtccggaatctgaagagcgtggaaatgacggggattcacgttcacctgaagtctcagatgctcgacgccgaactgatcgcggactaccaccggaagtgctttgatctcgcggaacggatcgcgaaggactacgggatcacggtcgaattcgtgaacttcggaagcggcatcggaacggtctataacgacgacgcggagaagccggtggatctcacggttctctcgaactcctttgccgggatcgccgcgaaaaaccgcgagacacttaaagccgccctctatatcgaaaccgggcgctttcccacctgccgcgcggggacgtattacgcgcgagtcgtcgacaagaaaacgtcccgcggtgtcacgtacctcgtggtcacaagcggcctgaatggcttcatccgcccgggattcgccgcgatggcggagcggattgcggcgaacggcgctgcctcggggcttgagcccttctacaccacaaagaacgaattccggattgaggtgctccccgctcaccccgcgggaaccactgaaaccgtgacggtcgcgggaaacctctgcacggcggttgacgtgatcgcggaagggattacgctcccgacgctagaggtcggtgacctcgtcgcggtcacaaacgccggcgcgtacgcggcgacgctttcgcctacgcggttctcgagccaccccgcgccgcaggaattcctctgggaagggaagtaa

SEQ ID NO: 2228 - DNA, 900 bp, Sutterella sp. CAG:351
atgacgccgctttcttacgatctcgtgattcagggaaagaatctttcccgcagcaaccttcctgcggaagcggcgggtctcgccggcttcatcgcggaaatcgcgccgggggccgtgaggcttgaatccgtgaatccgctcaccgcggaacccgtgatcgggagactccaggaagcggggctcgacgccgcgatggtgcgtcatggcctgaaactcacggaattccgcctcctcgcgagtgacctcgacagcacgctggtcgcgattgagacgctcgacacggtggcgaaaaacgcgggctacggcgacacagtggcgcaggtaaccgaagccgccatgcggggggatatcaaggactacgcggaaagcctccgccttcggatcgccgctgtgaagggctgccccgtaaaggcgttcacggatttcgcggaaacgatgccgtacagtcccggcgcggaacgctgggtgaagagctgccgcgcagccagtcttgagtgccacattgtgacgggcgggtttgatgaagtcgcggccgcggccgcggagaaactcggcgcgaacggctttcactgcaataagctcgggatccgggacggggtgctggacggcaccgtgacgggccccaaagaaaacggcgggaagattgtggactcggacggcaagcgtcacattgtggagcagcttgcggcggaccgcggcatcccggcctgcgatgtcatcacgatgggggacggctggaacgatgtgaagatgctggagttcgcggggcttggtatcgcgtaccacgcgaagccccgggtccgcgccctcatcccgcatcagatcaacagcctcgggctcgactccgcactgaactggttcgcggacggcccgtattgggcagagcgcgccggagtctaa

SEQ ID NO: 2229 - DNA, 441 bp, Sutterella sp. CAG:351
atgaaggtgatcgacctcgcggtccgtcacgtcgaatgtatttccgccactacctcagtgactgactgcgcccttgcgatgcgcacccgccacgtgggaagcctggtcgtagtggacggcggcaataagccgatcggcatgattacggaccgcgatcttacgatcgaagtccttgccaccggccgcgatatcgctgccaccaaggtgggtgatgtgatgacgagtcctgcggttgtcgcccagggtgaggagaacatcgtggacgcgcttgcccgcatgcgtgagttcggcatccgccgtctcccggtcgtggacgagaatggtcttctggtcggagtcgtcacgaattccaacatgctggaagaactctccaccatgctggacagcctcgtgcgcaatatcaagtcctcgaagacccgtgaggctgcgcttcgcccctga

SEQ ID NO: 2230 - DNA, 741 bp, Sutterella sp. CAG:351
gtgagacagatttgtctggatacggaaacgacagggcgtgatccggagaacggtgaccgtctggtagaaattggctgcgtggagctggacggccggcgtctcacgctggatgacaggttcctctaccacacgctcatcaatccggagcgcgaggttcctgaagaggttgtggcgatccacaacctgacgactgagcgtctagccggagagccgaagttcgctgaaatcgtggataagttcctcgactttgtccggggggctgagctcatcatccataacgctgagttcgacgtgggcttcctcaatatggagctcgccaggattggccgccctccgattgagagcatctgcagaatcacggatacgctcgcgattgcgagaaagaagcatccggggcagagaaacagtctcgacgcgctctgtgcccgctatggaattgataattcgtcccgtacgctgcatggcgcactgcttgactcatggctgctcgcggaggtctacttcgcactcacccggggtcaggggaatctcctcatggaagcctccggccgtgaatcggctgaaaagctgatgccgcttccccctccggaaagccttcgcatgattcgggctgacagccgtgaactcgcggcgcatgaggagcagctggataagatcgacaaggcctgcaagggaacctgcctctggcggtttgatccgaacgctccggcgccggaagagacaccggcaaagcctgcgtaa

SEQ ID NO: 2231 - DNA, 945 bp, Sutterella sp. CAG:351
atgaagatcctgcttccgatcgacttcagccgcagcagccaggatgctgtccgttttgtcgcttcccgcgagacactgcttggcagcaacccgcaaatcgaaattctgaatgtccacgctccgcttaagagaaagtcctcttttctcttcggcgagggggctctggacgactactaccaggaacacgctgagaaacttttctcacgcgcccgccggactctggaaagcgcaggcttcaaggtttcggaaacaatgctggtcggagttcccgatcagaccattgcggcagaggctgagcgctacaaggcggatctaattgtgatggggacacgcggtcttggggccctgaagggactcttcaagaattccgtctcaaccggtgttatttcgctcgctcactgccccgtcctgattgtccgcggcaagcacgacgaattcccggattcgctccgagtcggtgtggcagttgatggatcagcatacggcgaagccgctgtccgctatacgctgaagcaccgaaagcttttcggagaccacgcctccttcaccatcatcaacgcggtgaacgattatcgcggagccgcgatgaccaatgtcaccggcatcgcgcttccgacgctctccgacaaagatattgatcagctggagaagaacgagttcgaagatacggtttccaaggtgcgcccgattttcgcggccgaaggtattacgcctgacgaagtgaaacttgtcggcaccccggccgatgaaatcgcggcctatgcccgcgcgaacggcatcggtattctcgttatgggttctcacggctataaccgcctgaaaaccgctgtaatgggatcgaccgcggctgctctggccgctcatggcatcgtgccgcttctgatcgtcaaatccccaaaaattgagaaggctgccgtaaagaccgcggaaccggcgaaagcctga

SEQ ID NO: 2232 - DNA, 600 bp, Sutterella sp. CAG:351
atggcgacgatttatcttcacggttttctctcatctcctgactccaaaaaggggagaatcctcgcgctcgagcataagaagcgggggattccctttttcgccccggatctcaccatgtctcctgagcaggtatcagcgatgctcacgagattcacggcggggatgccccctgaggagctcactgtcgtgggatccagtctcggcgggttttacgcgacgtggctcgcggagaaaaccgggtgccgtgcggtgctcctgaatccggtggtgcgcccctgggagcttgtccgggattttctgggcgaacaggaaacctacggcggcaagcgccgcgtggtgatcactgaggactacgctgatcagctcctcaggctcgatacgcctgcgattacaatgcctacccgctatctcgtgctgctctccacatcggatgaagtccttgactggcacggggcggacagaaaataccaggcggcgaaacgcgtactggtgccgcagggcgatcatcagatcagcaactttgatcaatacagtccggcaataaccgacttctgcgccatgcggcctgaagcggctctttcgccggatgactcaaactga

SEQ ID NO: 2233 - DNA, 1005 bp, Sutterella sp. CAG:351
atgattgcggtatatccggtatcaattactggagatgcgctgatggcactaaagatccgaatgaaatcccgggactgggatttttggacacccctgctgctgggggacgttacgtctgacaccatcgatctgaaactgacgagagtgcagtccctgatcgataacgtggcggatgatcctgactgcgacgccgcggaaatgagtctttcgcggtacgcgatgcgccgaagcgcggggaccgaccggaacctcgtcgggatcccgtttttcatcatgcgggggttcagaaaccgctgcattctgacgtcagacgattccccgatcaccgcgctcgctgatctcagaggaaagcggatcggactctccggatggcaggattcagggaacacctggacccgggcgctccttcttgaagccggcgttccggtggattccattcagtggacgctttcccgcatgacggccgcggaccggattgatccggagcggggaaaacagttctgggatgaccgcgtggtgttccatgatccggatgaaacgccgctggtggatctgcttaaagaggggaagattgacgcgattttccaggctttcatgccggctgatttctatagcgaaggctatgggctgcggcagctccagcctgactttgtctcacaggaaaaggcctggttcggccgcgccggtttcgttcccgggattcatatcctcgcgatgaaagcggacttcatcgcggcgcatcctgaggcaccgaggcagctttgcgagctccttcgcgcgtcgcagaatctctggctcgcgaagcgccgcaagtacttcgaaaccacgccgtggctgatcgcagatcttattgatatggcgaagtcgcttcctgaagactgggatccggtggggcttgagccgaaccggaagatgctcgacgaattcgcccgtcagcagtatctgcagaaactgacccccgtgcagcgggatgctgattttctcttccccgtgaagacgatctga

SEQ ID NO: 2234 - DNA, 1056 bp, Sutterella sp. CAG:351
atgattgaacttaaacatatctggcagacctataagtccccggacggaaagacgacactcgatgccgtcaaagatgtctccatcacgatcaatgacggagaaattttcggcgtcctcggacgaagcggcgcgggcaaatccacgctagttcgctgtatcaacctcctcaaccggcccaccaagggaaatgtcattgtggatggtcaggatctcacgaagctgagcgcttctgagcttcgccgcgtccgtcacaagatcggcatgatcttccagcactttaacctgctctcctcccgcacggtctacgacaacgtggccctgccgctcgagcttgccggtgtcagccgcgacaagatcaaggaaaaggtcacaccgctgcttgagctcgtcggccttacggaacacgcgaagaagtacccttcgcagctttccggcggtcagaagcagcgtgtcggtattgcccgcgctcttgccaacgacccgaccgtcctgctctctgacgaagccacctcagctctcgacccggagaccacgacgtccaccctcgccctgctgcgcaagatcaataaggaacttggcgtcacgatcgtgatgatcacccaccagatggaagtggtgaagcagatctgcgagcgcatcgttgttatggatcacggcgaagtaattgaagaaggcagcgtgctcgatgtcttccgcaatccccgtcacccgacaactcgcagcatgctgagcggcatcctgtgcaccgagcttccggctcaggtcgtgcagcatatccgcgacattttcaaagcccacccgaatgactgcaataaggcgctgcgcatcaccttcgtcggcgaagaggcgactgaacctgtgatcgccacctgcgcgacccgctacggtgtgaacttcaacattctggccggccagatttccgaaatccaggaaagcactttcagcagcctcaccgtcgtgtgttcctgctctcaggaagcttacaaccgggtccgcgaatatctgatttccaacaacattcagattgaggagcttaacgatgctgttaacgcctga

SEQ ID NO: 2235 - DNA, 792 bp, Sutterella sp. CAG:351
atgtgggtgcatcctcagttcaatccgatcgctttttccgtaggacctctgtccgttcattggtacgggctcatgtacctggtcggtttcgcgtttttctatcttctcggccggattcgggagaaagagaagtggcgcggtatgtctggagaggatgcgcttgaggatctcctcttctacggcattctgggtgtcgtgctgggcggccgaattggatactgcttcctttatcagccgtcctactttatccagcacccgctcgaaatcttcgcgatatggcagggcggcatgagcgttcatggcggtatgatcggctgcctgctcgcaatgctgtactttaagcactcgcatggcgtcggccttctgaagaccgcggacttcgtgacgccgctggtgccggtgggacttttcttcggtcgtatcggtaatttcattaatggggagctttggggacgggtgacaacgcctgacttcccgttcgccatgattttcccggagtccggaacgatgcagccccgccatccatcccagctttacgaagccggtcttgaaggcatcgtgctcttctgcgtaatgtggctcttttcccgtcgccagaagccggaaggcgccgtgacaggactcttctgtcttggctatggcatcatccgtttctgcgtggagtttgtccgtgaaccggattccttccttggtcttcgggcgcttggactgtctcaggggcagtggctgtctctgccgctgattcttctcggtatcttcctgattgcccgggcataccgggtacgccgctga

SEQ ID NO: 2236 - DNA, 765 bp, Sutterella sp. CAG:351
atgcaaggccgcgtaacggagtctccgttccgtctcgccgcggttattccctgttaccgccaggcggacaccctgaagggggtgctcgagtcactccgtgcactcggaatccggtcttatgtcgtggatgatgggaatgagcccgaggagtctgcggcgatcctcgctgcggtgagatccgttccgggaacctgttacctccccatgtcccggaatcgcgggaagggcgccgcggtgacctttggaatcgaggcgctgagtctcgggggctatacgcacgcgcttcagattgatgccgatgggcagcacgatatcgcggacgcccccagactgatcgaagacgcgaagcatcacccggacgcactgatctcggggctcccgcagtatgacgactcggcgccccggggccgtgtgatcgggcgctacatcacccacttctgggtctggatcgagacactgtcatccgaaatccgggacagcatgtgcgggtaccgcgtgtaccccgtgcaggagttcctgacgatagcccgcaactaccgtatcggccgccggatggacttcgacaccgaaatcatggtgcgctacttctgggacgggaagcggattcgctttattccgacccgggtccggtatccggagggcggagtctcgaatttcgactacttccgggataacgtccggatttcgctgatgcatacgaaactcgtgctggagtcaccgcttcactggctcgcgcgtctgaggagacctcatgacgggccgtag

SEQ ID NO: 2237 - DNA, 2361 bp, Sutterella sp. CAG:351
atgaaagtcctcgcaacgcgaaaagatgagagcctatttcaggggctttcacgcacggaagaaatttcaccgggcaatttcggcttctacgcgacatggatcgcgctcgccgtgattctttcggttttcgttatttccgctctctatatctcgcatatctaccgcacaaatgagcggaatgatattgcccagtccgcggagctgctcgcggaaaccgttgacgcccgtctgtcgacgacgagcgaggcggtttcccgctactccttcagcatctttcaccacccgaactggcgtctttccacccgtgcccaggggctggccagacgcctgatggagtcccgccccgagattgttgaaatcagtctcgtgaaggatgagactgttctcacctcgtacgcttcaggatttgcgttcgaggccctcagcctccccgcgggccagaagctcgcgatgcaggacacactggaaaccctgaagcgcgcccacgacagtgagaccgcgctcttctcgaatccctatttctataaggggaactcaaccccctatatcaatctcattgttccgtcgaccaataatgaagccatcatcgcgcgcatttcgctcgcgggcttcatgcatcaggtaacaccgagctcgctccttgaccgggcttctctgtcactcaaagtgaacgggaagaaattcatttccacttcctccgtcgctcagacgactgaggagtcgtttgacattctcctcccgccgcttccgcctgcggtgacactctctgtttcccccttcaaccgccccttccttttcaccaaggatctgtcaacgctctccattctcgggcttggcaccgcgctgcttgtggcgtttctgggtctcgccgggttccagatccgtcagcgccggacatcccggcatcttctcgcggagtccgtgatccgccgcgcgatgtctgaaagcatcgcttccggcctccgggttaccgacatgcggggaatgatcgtttatgtgaaccgcgccttccgggatctcttccgcctcggaaataagcagatcgctggagaaatgcccccctacagctactggtcagagcacgaacgggacgagtatctgaagctcgcgcgtgatgtgacagacggcgaaaatctccgccggcagtttgagaccacggtcacccgtcctgacggcacaaccttcattgcgtcgatcgaactcaacccgctcaccgatgacagcgggaaccagattggctggcttgaaatggtctccgatatcacggaggcgaagaagatcgcggacgagctcgcgcgcggccgcgaacgcatcaccaaggtgctcgactcgattgactccgctgtgagcgtccttgggaaacggaacggcgaaacgattcttctctacacgaatccgacgtatcacaacctctggggagacgatccgtcgccgcaccagaaactggtgtccgaaattcccaataaggatgcctcatccggcactctcaccggcatcattcactatcttcctgaagacaagtggtttgatgtccgtgagcgtgaactcgtctggacagacggtctcacggcagagctgcagattgccaccgatatcaccgaacgacggaaaaatgaggaactcgtcgcacagcaggaaaagaaggctgaactctcgtcccgcctgatcacaatgggcgaaatggcgagttcgctcgcacacgaactgaatcagccgctcggcgccatcacgaactacgcgtccgccgctctcacgctcatgcagatggggaaactttccgaaagcgactgcgcccaggcctttaacaaagtgtccaatcaggccgagcgggcagcggcgattatcaagcggatccgttcattcgcgaagcgtaccgcgcctgaaatgacacccacgccggttcagaaactgattgatgaaacgatggagctcgcgctgattcaggcgaaaaagcgtgacgccacggtgaagcttgatatttctcctgaagtgagcagcgtcgtgtgcgacgccgtgatgatcgagcagctgcttctcaatctgctgaagaacgccatggaagccgcggaaccctgcgagaatcatgaaatcacgctcaccgtgaagccaattgagtccgagcatcaggtagcattcgagatttctgaccacggcccgggcattccggctgacgtgaaggcgaagctcttcgaaccgttcttctccacgaaggcagaaggaatgggcattggcctcaacatctgccgctccatcgcagaaatgcatcaggggcggctccgcgtcgaggacaatccgggcggcggcacaatcttcatcctgacactgccggcctatacggaaggcgccgccttccaggcgtaa

SEQ ID NO: 2238 - DNA, 582 bp, Sutterella sp. CAG:351
cccggtgccacgatttacgaaccgacctccggtaataccggtattggtatttccatggttggccgtgctcatggctacaaggttgttatcgtcatgccggatacgatgtcggttgaacgccgcaacatgatccatgcctatggtgctgagattgttctcactccgggtaaggacggcatgaagggcgccattgcgaaggctcaggaacttcatgagaaggatcctggctcaatcatcgcctgtcagttcgataatcctgcgaatccgcaggctcactacgaaaccactggtcctgaaatctggcgtgacacggaaggcgttgtcgactactttgtcgccggcgtcggcacgggcggcacgctgacaggtgccggacgttacctcaaggaaaagaatccgaatgtgaaggctgtagctattgagccgaccacctctccggttctttccggcggcaagcccggtccgcataagattcagggtatcggtgccggtttcattccgaagacgcttgatacgtctgtttatgacgaagtgatcacggtcaccaatgaagacgctttcgcgactggcaagaagcttgcc

SEQ ID NO: 2239 - DNA, 1128 bp, Sutterella sp. CAG:351
atgccgctgagccgccgaaatctgctgacactgcttctgacagccgcgatacccgggctgccggcggctgtctgcgcgcagcttccggatccggctctgagaaagacggagtcgagcgaggatacgtcttaccccgcgatgcctgaggtacaggcttacattgaggaaacggccgcggcaacgcagctcccgaagtctttcatcgaggacgttctcgcgcaggccacgtattcagcccgcgtggaacagctgatgacgccgaaacctcggaagccgaacgcgccgaaaaccgcggtccgcggcgactggcgggtttatcagcaccggatggtcggaaaatcccggattgagaagggatcggaattccttgaggaaaacgacgaagcctttgggaaggcggaggaccgctatggcattccgcgtgacatcgtagcgtcgatcatcggcgttgaaacggtgtacggcagaaaccagggcagtttccgcgttctggattccctctgcacgctcactttcgattacaagcgccgcgcggactacttcaggacggaactcaccgagtttctcctgctgcttcgcgagcagcatctcgatcccgccacggtctatgggagctttgcgggtgccatcggcatggggcagtttatgccttcctcggtgcgcaaatacgcggtcgactttgacggggacggtcagatcgatctcgttgggtcgagcgcggatgcgatcggctcggtagcaaactacctcgcaagccacggctgggtccgggggcttccgccgttcttctcctgcacaccggacagcgacgccgatatgcgccttgtgaccggcggtatcgccaccgatacgacgtttgaccacgcgctccgggccgggttcattccggattttgaactcaatatcccgggcgacgaacctctgatgatcgtcgatctcccgtaccgcgaccaggatggaaagcaggcgacggagtatcgcctcggaacccggaatttccagacgattctgaactataaccacagctatttctacgccagcgccgtgtctgatctcgcggaggaaatcgaaacgatctcgatggacagcgcggcggccagcatggcgtcaggctccgcctcttcctga

SEQ ID NO: 2240 - DNA, 2094 bp, Sutterella sp. CAG:351
atggatcgggaaacccagccgcttacgcgtcacctcttcacgccgcgccacatccttcacgcgatgtggcttgcgctctatcgcctgaaccccgtggcgctcatgatgaacccggtgatgttcatcgtgtggatgggtgctgtgattgtcacggtgctcacggtttacgaacttatctttccgcactcttatccgagacacgcgcacgacatctttttctcgatgtccctcatgatctggctctggatcacgctctggttcgcgaacttctcggaagcgctcgcggaggagcgggggcgcgcccaggcgatcgcgctccgcggcacaaggcgtgagattctcgcgaagcgaattaagtccgtggacgacgtgacgtcgcccgagctcgtgctcgctgagaacctgaagaagggtgacctcattctgattgagccgggagacgtgatcgcggcggacgccgaagtgattgacggtgtcgcctccgttgacgaatccgcggtgaccggtgaatccgcaccggtgatccgggagccgggcggcccgaactccgcgatcgtcggcggtacgcgcgtgctttctgaccggctgattgcccggatcaatgtggagccgggggactcgttcctcgacaagatgattacgatggtggacggcgcgcggcgccgccggaccccgaacgaagtggccctcacgatcatgctgatcgctatgaccgtgattctccttctctcctgcgcgacactcgtgccgttttcgctctacgcctctgaaatggcgtcccgcggggcgccggtccgcgtgatcacggtggtcgcgttcctcgtgtgcgtggtgccgaccacgatcgcaggtctcctctccacgattggcgttgccggcatgagccgcatgctgaaagcgaatgtgatcgcgatgtcggggcgcgctattgaggcggcgggtgacgttgacgtgctgctgctcgataagaccggcacgattacggtcgggaaccgcgaggctatcgctttcgtgccgcttcagggtgtcacggtggccgagctcgctgcggccgcggcagccgcttcgatcgcggacgagacgcctgaaggctattcgatcacgcggctcgcgaaagaacgctacaacgttcagattgatatcaattccttcaagggcgcgaagtttgtcgccttcagcgcccagacccgtatgtcggggttagaccttggagaccgcagcatccgtaagggtgctttgtccgcgatcagcgcctggctccggcagaaaggcatgtcgctcccgaaagaagctgaacagaaggcaatcagcatgggccgccgcggtgcgaccccgcttatcgtcgctgaaaacggccgtgtcctcggtatcgtggaactgaaggatgtgatcaagaccgggatccggcagcggttcaatcagctgcggagcatgggtatccggaccgtgatgctgacaggcgacaaccgctatacagcggccgccatggcagccgaggcggggcttgatgactacgtgggtgaagcaaccccggaggataagcttcgtatcatccgccgctatcaggctgaggggaaactcgtcgccatgacaggggacgggacgaacgacgccccggcgctcgcgaaggcggacgtcgcggttgcgatggggaacggcactcaggccgcgaaggaagcggggaacatgattgacctcgactcaagccccacgaagcttcttgacattatcgatatcggcaagcagatgctcctcacgcgcggcgctctcaccacgttctccgtgagcaacgatatcgcgaagtacttttccattattccggccgcctttgcgacgacctatcctgagctttccgtgctgaacgtgatgcatctttcgtcaccggaaagcgcggtgctttcaaccgtgatcttcaacgcgctcatcattctgctgctgatcccggtcgcgatccgcggcgtgcactacaaggcctcttcgccgctcaagcttctgcggcggaacgtgattgtgtatggcttcggcggtctgattgtgccgttcgtgctgatcaaggcgatcgatatggcgcttgcctatctcgggatcttctag

SEQ ID NO: 2241 - DNA, 1170 bp, Sutterella sp. CAG:351
atgacgactaacattaagacgcttgactctcagtacattgcgaacacctactcccggtatccagtgcagattgtcgatggtgagggatcgatcctcacggatgaaaacggcaagcactatatcgatctcggttccggaatcggcgtgaatatcttcggccagaaggatccggcctggattgaagctgtgcagacgcagctgcaccgtttccagcacacctcgaacctctactactccgctcctgacgcggagctcgccgaattcctctgcgaacgcacaggtctcaagaaggtgttcttcagcaattcaggcgctgaagcgaatgaatgcgccatcaaggcggcacgcgcctatgcggcagcgaagaaaggcaaagagtggaacaccatcgtgacgctccgcgactctttccacggccgtacgcttacgacgctcgccgcaactggccaggacatgttccaccaggactttctccccctgacaccgggctttgtccacgcggagcctgatgacctcgaagggctgaaacagatcgtccgcgagaaccgcgtggccggcatcctgattgaatgcgttcagggtgaaggcggtgtccgggcgctttccgacgcctatgtgaaggggggcgctgaactctgcgaaaaagaggacatcgttttcatgacagacgaggtccagtgcggaaacggccgcactggaaagctctatgcctatgagcattacggcgtgctccctgaggtagtgtcgaccgccaagggtcttggcggaggtctgccgatcggtgccacgatgctcgggaagaaggttgaaaatgtcttcaccccggggaagaacggctccaccttcggcggcaatccgatcgtctgcgccggcgcgctttcaattctgaagcgtctcgacgataagttcctcgccgaagtcacccgcaaggggaatttcgtgaaggagtacctcgccggaaaacccggcattgagcgtatttctggcctcggcctcatgatcggcgtgaagaccgtgaagtccgagaatgaagtcgtcgcgaaaatgatggagaacggcgttctcgccctgaccgctcatggcggcatggtgcggcttcttccgcctcttaacatttcggacgctgatctgaaaaaggcgcttgacgtgctgcttgccgcagcggcctga

SEQ ID NO: 2242 - DNA, 1308 bp, Sutterella sp. CAG:351
atgaagggctatcggctcctcacccgggcagcggtgcccgccgcgatggggtatctcctttaccgaagccgccgacagcctgcttatcggaatttctggggggagcggttcgggttctctgaatatccgccgcccagggggtgtccccgggtgtgggtccatgcggtgagcgtcggcgaaacaaacgccgcgaaaccgctgatcgcggagtgcctgaaacggtggccagaagcggattttcttctgacacatatgaccccgacaggcagagatgccgggaagcgcattgtggcgatggcacctgaccgtatttcccagtgttatctgccttacgacacaccgggcgcgatggaagcttttttccgcgagacaaaaccctccattggtattgtgatggagaccgaaatctggccgaccatgatggctgaagctgcaaagtggggagttcccatggtgcttgccaatgcccgagagtcccagaagagtcttgatcaggcgcttcgggttcccaggctgatgattccggcagtgaaacagtttgctgtcattctggctcagtcccgaccggatgctgtccggttcaaagaactcggtgcggagcggattcaggttgtgggcagcatcaagtttgatattcagccggatgccggccagcagaaaaaggcccgggagtggaaggccgcgatcagccgcccggtggtgctttttgcgagctcccgtgagggagaagaggctctttttcttgaggcgcttcagaagggaggaaaggcgctctttcaggggaatccgatctttcttgtggtgcctcgtcatccccagcgattcgcctctgtccggcagcttttccttaattcggattaccggatccagagccgctcagagctttctgcaccgaatgaaattgctcctgacaccgacattctcctcggtgactccatgggggagatgtccttctactgcgcgctctccgatgtcgctctgatgggaggcagtttccttaactacggctgtcagaatctgattgaaccctgttcaagcggcgtccccgtgatcgtcggtccgagcacctttaatttctctgaggtggctgcccgggcgatagaggaaaaagcagcggcgcaggtgatggatttccgggagggactcgaacgggcggcaaaactgctcagcaatgctgaggtcctgaaggaaaaatcggaaaacgcggttcggtttgcctcttcctataccggagcgactgatcgcaccatgacggtcctggacaaaatatggaagaaacagccgctcgggtcgttcccaacattctga

SEQ ID NO: 2243 - DNA, 885 bp, Sutterella sp. CAG:351
atgacagacgcaggatttctctcgcttacgccgcagctcgcggcggctcactggggatggacgatcgcgttcttcctctggttcatcggcctctccgggatgctgatggcgcttttctacttcgtgcgggataaacggatcgcgctcgtctctttcgtcgcgtcgatcctcggctgcgtctttgtgctctcgcacctcgcgcggctcacgaatctcccgttcgcggcgtttaacgcgttgatcagcgggagcctcaacttcggctcctggatgctgattggtatctgcctcttaggcgtgcaggcggtgctgacgcttgtcgcgaccgccgtgctctacgggaaatttaagcccggctgggccccgatcttcacggaacggaaggcggttccggtgctgctcgccgtggtcggtgtcgcggtcacggtgtactccgggttcctcctcacgcaggcgtccggcgtcaccttctggcacacggcgctgatcccgatcctctgggtgctttcgggccttggctgcgcgctcgcggtctgggagttcctcgggttccgggataagaaggcgcttccgggcacggcccggacggccggcatcgtgattgaggtgtcggagcttctcgcgctcttcgcgctcctgcaggtcagggcgagtttctcgactccgggcgcgaaagcgggtgccatgagcctgatttccggtgactgggccgcgatgttctggatcggcgcggtggcggccgggatcctcctcccgctcgcgatccgggtgttcggggaaaaagcgaagttcgcggctccgctctgcgcggttctcgcgctcgccggtgctctctgcatccgggcgtcggtgctcttcgccggatactttgatccgctcgtctga

SEQ ID NO: 2244 - DNA, 921 bp, Sutterella sp. CAG:351
atgaagactattggaagcgttgctattatcggaatgggtgccctcggtatcctgtacgggcacctgattggccggagaattggctatgaaaaccttttctttgtcgcagatgccgcccgggtggagcgttttaactcagctggcgtgacctgcaatggtgagaaatgtccgttccggatgcttgaggcaaaagatgcaccgactcctgatctgctgatttttgcgacgaaggcaactggtctggaaagcgcaattggtctcgcgaagcagtttgccggttccgataccatcatcatttcgctgctgaacggaattacgagcgaagagatcatttcggaaaaactgggaggccgacatgttctctacacagttgcgcagggcatggatgctacaaagatcggcccagatctgaggtattcgcatcccggaacgctttgtgtgggactgcccgcagaggataaggaacgtcttcctgatctgggaatgctctgtgagctgctgacccgctgtgatgttccctttgagcgggatccggatatccttcaccggatctgggccaaatggatgctgaatgtcggtgtcaatcagctctgcatggttgaggaaggcggctatgctgttgttcagaagcctggtcccgcgcgcgatcggatgatcggggcgatgcgggaagctatgcagatcgcccagaagagcggtgtcgcggtgacagagaaagatctcagtttttatgtaggactgatcgacactctggcccctgaaggcatgccctcaatgcggcaggatggtctcgcccatcggctctctgaagtggagtcgtttgccggaactgtggtaaagaaggggcacgaacttggtgtctctgttcctgtgaatgaatcactttatcgtgaaatccgagagcgtgaggccggatattag

SEQ ID NO: 2245 - DNA, 885 bp, Sutterella sp. CAG:351
atgacgaattctgaattcaaagcggcggatgtctccagggcacgccgcccggtgccctgggtaaggtgggtgctatacgcggcagtgaccgcgatcatcctgtactttctctggatctgctctaagaacccgaattttgagtggggagttgtcgcgcagtactttacgcatgactcaatcctccacggtatcaagatgacactggggctcaccgtggtttccatggtgatcggcacggtgcttggccttatctgcgcgctcgggaaactgtccggcagccgatttttcaatacgctcagcaacatctacctgtggttcttccgctcaacgccgctgcttgtgcagctgcttttctggtacaacctcgcggcgctgttccccgaggtaacgctgcctggtgttggcgcggtatcaaccaatacgctcattacgcctctttccgccgcgatcatcgggctctcgctcaacgaaggcgcttttatgggggaaatcatccgggcggggctgctctccgtagacccgaatcagaaagaaaccgctcaggcctttggtatgagccgtcttcagatcatgttccgcattctgattcctcaggcgatgaccgctatcattccgccgaccggaaaccaggtgatttctatggtgaaagcgactgccgtggtgtccatcattgcgatggatgatcttctgtactcggttcagacgatttacaacgtgactttccagatcattccactcctcattgttgcggttatctggtacctcatcatcacatcagtcctctccgtgattcagtggatgattgagcgtcatttttcgaaaggccgcagccgcagcacgccggctgctgaagagaccctcgcggcggaaggagtaagcgcatga

SEQ ID NO: 2246 - DNA, 1095 bp, Sutterella sp. CAG:351
atgcatctggcagaacaactgattgagtggcagaagcagcatggccggcatgatctcccgtggcagaagacccgggatccgtaccgcaggtggatatcggagatcatgctgcagcagactcaggtcacgaccgtgattccttactatctgaaatttatcgaggcctttccggatgtcgggactctggcagcggcttccgaggatgatgtgctcaggcattgggcagggctcggttactacgcccgggggcggaacctgcttgcctgcgcgaaggctgttatggcgtccgggggcaaatttccgaaaaaacgggaggcgcttgaagcgctgcccggaatcgggcggtcgaccgcggccgccattctctccagctgctgggatatgccggaggccattcttgacggcaatgccaagcgggtttttgcgcggtatttcggtgtgaagcggggagaaagcgaaacgctgtatcagaagaagctctgggagattgccgaggagtctgtgccgcagaaggagtgcggcatttatacccagtcgctgatggatcttggatccatggtctgccggaggtcccggccggactgcgacagctgcccgctgcgggatggctgcaaaggatttgcttccggagatccttccgcgttcccgggcgtgaaaaagcgggcggagaaaccggtccgctcttcttctttccttgtcatccggtcgggaagccggctttggtctgtccgccgggaaatgaaaggggtgtggcaggggctttactgttttccggaagcgccgggctgtgaagaattgcccgatcccacggctcttctcccggagggggctgcggtacagatgccgctgacttacgcgggacggctgccacatgaatttactcattaccggctcgaaatgcacttctgggaaggggaggccaatcctgacacgctgcggcacttcaccggaggaaagtggatcgatatccgggacgcggacgctgaggcactgccttcccccgttctgaaatttatccggacgagattcgccgggatcctagatccgagggagcttgagcgcccggtgacggacgacgacaccggcaatgcttga

SEQ ID NO: 2247 - DNA, 1110 bp, Sutterella sp. CAG:351
atggaaaaagtcgttgtaggaatgtcgggcggcgtggactccgcggtcagcgcctggctgctgaaagagcaggggtacgacgtggtcggcctctttatgaagaactgggaggatgacgataacggcgagtactgcacgagccgccaggatctcatcgatgcctcaagcgtcgccgatctgatcggaatcgatctccaggccgtgaatttcgcgaaggaatataaggaacgggttttctccattttccttcgcgaatacgaagctggccgtacaccgaacccggatgtgctctgtaattcggaaatcaaattccgggcgttccttgatcacgcggtcaatatgggcgcggactggattgcgaccggtcactatgcgagaacccgccgccttgatgacggtacggtgcagctgctgaagggatcagatcccgggaaggatcagagttacttcctgcaccgcctctctcaggagcaggtaagccgcgcgattttcccggtcggcggcatgatgaagactgaagtccgcgccatcgcaaaaaagatcgggcttccggtcgccgagaagaaagactctactggcatctgctttattggtgaacgtcccttccgggagtttcttgaacgctatctgccgacgaaagaaggtgaaatccgcacgcctgacggcacgccagaaggccgtgtgatcggaaagcacatcggtctcgcgttctatacgatcggccagagaaaggggatcggtatcggcggatgccgcaattccgaagaaaagccctggtttgttgccaaaaaggacatccgcacaaatacgctctgggtcgtgcaggggcacgaccacccgtggctcctcggagaccatctgttcgcggattccccttcctggatttccggtcacgcacctgaagcaggctcaaagctcggggtcaaaacccgttaccgccaggcggactgcccggccacactggcctcggttgacgggaaacagttcgctgtgaagtttgatgatccgcagtgggccgttacccccggtcagagcgctgtgctctatgacggagaagtctgcctcggaggcgggtttattgaaggcctcagcaacggtcaggcccggtaa

SEQ ID NO: 2248 - DNA, 1053 bp, Sutterella sp. CAG:351
atggtgaaaagcgaagactttctgccggcagcgtccggccttgatggtatcgaatggacggaggataccccgaagctcattctgagctacggagacacggcggctgaaaagcattctgctctgaccggtgccttcctgaaggatgtccgggcggcccgggtgatccgtacggagggagagaacggtgagaagctgcttcgccgtctgattacggccgatgtggcgaagcatgccacgggcgactgccttctcgcctcgatgctgaacgcgtcgggcggtgtcatgcaggaagtggccgtgattgcccacaccgggtactgggatgtcgtgctgtttccggaaacggcggacacgggacttgcctggtcgaggcaggtctcggtgtcttttgaggctgaagtggagcagccggaagaccgtcatgtattctggcttggcggtccgcttgcatccgacacgctgaagaaggtgtcctgcagtgttccgaaggcgggcagcttcacggaaccagaggacggggttcaggtctgtgcttttgaggatattttcctgattcagggtgaggcttcgaagctggatgctttctggaagaaactggccgcggctggcgcagcgccgatcggcgaagaggtctgggaagctgcccgtacagcgatctgcttcccggcgtttggctgtgatttcgatgaatcctcctctccgcttgaagtgggtcttggctcgtcagtcgacttctctgatccagcccgtatgttcattggccgcgccctcaccgaggcccggtaccgcgccggtatccgctgccgccttggacttctcgaaattcagtcggatgacgatgcctcgaaactcgactccgcgcccgaagtcgtgatccgagggaactcctctgaaggcgggatcatcaccacatggactctctcagactcgggtactattcttgccctcgcgcttctcccggccgaaagccatattggggatgaggccgaagtgtcctaccgcgcgggcggtgaggaccgggtctgcgcaggcaaagtcatccggctcaggtaa

SEQ ID NO: 2249 - DNA, 798 bp, Sutterella sp. CAG:351
atgctgaaacttgaaaacgtttataagacattcttccccgggtccccgaatgaaaagaaggccctccagggtgtgagcttcacgcttgaggacggtgactttgcgacggtgatcggcagtaacggcgccggcaagtcgaccgttctgaattcgattgccggtgtattcccgatcgactctggacgcatcatcatcggagacaccgatgtcaccaaaatgccggagcataaacgtgcccgtttcatcggccgtgttttccaggatccgatgaagggaacggcagctggcatgcagattgcggagaatctggctatggccatgcgccgcggccagagacttggactgcggtggagtgagagttcaaagatgtacgagcatttccgcgaaatgctcgctgagctggatcttggccttgaagaccggctgaccagcaaggttggactgctttccggcggtcagcgtcaggctgttacgcttttgatggcaacaatccgccgtcctgagttgttgctgcttgatgaacacacggcggctctggacccgaagaccgcggagaaggtgcttgcgattaccgatcgtttcgttcatgagggccgtctgacgactctgatgattacgcataacatgcgtgacgctctccgtttcggtaaccgtctcatcatgatgcataacggccgagcgattgtgaatatcgctggagaagagaagaagaagctcacggttcaggatcttcttggtctcttcgaaaaagcttcgaacggagaagcggatattcccgattcgatgattcttggctga

SEQ ID NO: 2250 - DNA, 1395 bp, Sutterella sp. CAG:351
atgcaggtgatcgatcccagtatttttaaggcgtatgacattcgcggagtggcaggtgagaatctgcccgccgatgtggttgaaaagatcggacgggttctcggatccatggcggtggaaagcggcgtggggccggtctgtgttggccgtgacggccggctttccggtcctgaactgaaggcggcgcttatccgcggcatcgcggcggcaggagctgatgtttatgacatcggcatggtgccgactcctgtgctctactttgcgacgaagtacttcggatccggttccggtgtctccgtgacgggcagccataatcccagccgtgacaatggtctcaagctgatgctgggcggaaagacgctctttggtcccatgattcaggatatccggcgccgtgtggagtctgaggagtggagcgttgctgagaagcccggcaaggtggaagtgaaggacgccgaaaccccgtactttgagacggttacccgggatattcatctcgaacgtccggtgagcgtgctgcttgactccggtaacggcgtgacgggaccgcttgccatgcgcctttaccgcgcggcgggctgccaagtggaaggtcttttcacggaagtggacggtcacttccccaatcatcatccggatccttcgaagccgaagaatcttgagcagctgattgaacgtctgaaagcgtctgacgcagaagtgggtctggcgtttgacggtgacggcgatcgtcttggggtggtgagccgcaagggcgagattatttaccctgatcgccagatgatgctttttgccgcggatattctggagaagaagcccggcagccggattatctatgacgtgaagtgcacgagaaagctggttgactgggtgaagagccacggcggtatcccgactatcagctgcacgggtcactctttcgtcaaggcgaagctcgcggaaacgaatgcgccgttcgccggcgaaatgagcgggcatatcttctttaatgacggacgctggccgggctttgatgacggtctttacgcaggcctccgtatggtggagattctgtcccgtacggatgatccgacggcacttctcagcagccttccgacggccgtcaatacgcctgagcttcaggtgccgatggctgagggcgaaaataagaagttcgttgagcgcctccagaaagaagtgcattttgatgacgccactgatgagatccggattgatggtctccgcgttgagtggccggatggttttgctctcgcccgcgcgtcgaatacgacccctgtgcttgtgatccgtctggaaggcgatacgcctgaggctctgaagcggattgagcaggtgttcggcgcggccctgaagaaacttgatccgtcgatcaagctgcctttttccgcagaataa

SEQ ID NO: 2251 - DNA, 744 bp, Megasphaera elsdenii
atgagctctttgacccggacagccccggcatggccgcggttcttttccttgatggacacggaaaagatgacgcctgtccatccaggctatgggcgctgtgtccagcagtacttccacagcctctttccgcaccggcagtggaaagtctttcacgatccggatgggacgccgctggctgtcgatgtcgaactcctgtacccgaccgttgaagaacctttttatttgcttcataccatgggcatgagtgctgcgcctatgcactatccgtccggtgaatttgtgaccgggaaagaagggtacagcgaactctgcctcatcttgccggccgactggcctttccgcaaggaccgggacctttccctggctgatgaacaggcctggcctatttggctgctcatggagttaggacggtttcctcacgtccatgatatgtggatggcttatggctttctcctgcccaatacggaggccaatgagccctttgctgcagatacggctttatccggcctggtcatcgtccaattcgaggggcagctgggcggcgtgaagatgcccgatggtacggctgtcgaattgctcatgcctattttgttgtataaagaagaaatggatttgtgcagcgacatcggcgtcgatgcccttgtcgatgccgtcatagatgagtgtggcggttcttttttactggataaggaccggccgaacgtcggccttggcgattatccgtgtatgggaatcccgctatga

SEQ ID NO: 2252 - DNA, 546 bp, Megasphaera elsdenii
atgaccatcaaaacgagaatcctggcagggcttgcctgtatttgcttgatattgacgatttttttctggcctgtcaaggaagaagaggcttatagttcggatgtcatcaaggaagcggaagacgtgacgacggctgaaacggaaatgatggcccctgatgaatctctggaatcacctaatggtacggtgtggcttcaggccttgtataatgagaaaccggtttgcctcttcttctggtcttcctggagccaggacagtttgcgccagctcgcagcactggaagaagtgtatccaacgtatgggcaagacattcatttcgtgacggtccctgtcggaccggaccaggaggacagcttatcttatatgaagcagagcggggcaggcctgcctgtctattgtgtccgggaaccgatgctgaaggaatatggcgtccatgacataccgaaactcatcttcatcgcccgcggtggccagatgacgcgccccttcgacagcgttttgacgccgcgacagttgtcctatgaaatggaaaagttattaaaataa

SEQ ID NO: 2253 - DNA, 468 bp, Megasphaera elsdenii
atggttacagatgcagatgttttaaaacggtggaagtacattgcccaggacgatgaaaaattgttgattctcattggcggccctggttccggcaatagcaaactgattcgtgaactgactttccaggacggctggaaaatctgtgaagcccgggaactctttgacgatgaatttttggaaattcctcgtgccgaccgcccggataaggccattgccctggtatcggcagcaatccaccgcctcaatgcccgtgtcgtcatgattgataacgtggaatttctgttcgcaccgatcttgaacctcgaccccgtcgccatgttgaagaagttgagccgggaatgcccgatcatcgtcagctggcgcggcagtttggaaggcaataccttgtactttgaacacaatggcgatccgaaatatgctaaattcgtcatcgacaacccgaatcacgtcatttgcctggatgaataa

SEQ ID NO: 2254 - DNA, 447 bp, Megasphaera elsdenii
atgaaagccatcgtcgtctattcttcgaaaacagggcgcatacagcagatcgcccaggctatggcgcaggtcttgccgcaagggacgccttgcgttcccgtcgatgagatgccgtctgatttttccaattatgactgcgtattcatgggcttttggatcgatgagaaccaggcagaccctaagggacaggaagcgttgaagaaaattgccaatgaccacgtggccatctttactaccatgtacgacgacccctattcggaccaggcgtcgaaacacctgcgcagtgccgtagagctgctgaagcctggcagcggtgtcgtcgggacctatatcacctggactgataaagcgcgttatatgtacgaaccggacgccggcgaagacctgcatctcgatgaggcccagtccttcgccaaaaataccgtgagccgcctcaagggaaattga

SEQ ID NO: 2255 - DNA, 789 bp, Megasphaera elsdenii
atgaaacttaaatacattgccatctttgccctggccttcgccgtctgtgccggctggaacctgctctttgacgcgccgaagacggccaagcctgctgtcgagacggctgccaagctccaagaagaaaaggaaccccaagggagctggccgtcgccgctgcggccgctggaaatccgggtctatccctacctgcacttccacgaagccatggataataaaatcaagaaaatccccgtctacgtggccatcagcgccatttccaagcccatgcagcacgccgtcgtggctacggaagaccgccgcttctacgaccacggcgccatcgacccgattggcatcatccgggccgtcctggtcaatatcgaatcgggcgaaaccgtcgaaggcggcagcaccatcagccagcaggtcgtcaagaacgtcttcctgtcccaggaccggacgatggcccgcaaagcccaggaatttgtcatggccttcttattggaacattactacagcaaagatgaaatattggaaatctatttgaatacggcctacttcggtgccaatgccacgggcatcgacgatgcggcccggacgtacttcacgacgacgccggaaaaactggacctggcccaggcctccctgctggccggcctggtacaggcgccgacgtactataatcccctgaaaaattacgaaggtgccaaagcccggcagaagacggtcctgaccttgatggccgaacagggctatatcagccaggaacaaggcgcagaagcctataaaaaagacctcggactctga

SEQ ID NO: 2256 - DNA, 438 bp, Megasphaera elsdenii
ttgtatgtgttaggcattgccctggccgtgaccgttgtcgatcagctcaccaagctggcggtacaacaggacatggtccttcatgaatccattccggtcattccgggattttttcatattacttatattttgaatcgcggtgctgcttttggaatcctggaaaatcagcagtggttctttttagtcatagccctggtcttattcctgctgtatggcctgttccgcaagcagctgccggcgaacccctgggtctatggcggatccggcctgcttttaggcggtgccctgggaaatgcgctggatcggacgttccgcggggccgtcacagatttcttcgattttcgtatctggcccgtcttcaatgtcgctgatatcggcattgttgtcggcgtcgttcttttgttatggtatagttggacccatatttcagataaatga

SEQ ID NO: 2257 - DNA, 579 bp, Megasphaera elsdenii
atgtttatcatatatactgaaaataatcacattgtcattcacaaaggaaagggggaatgggccgtgatgagcgcctatgatatactgacagggattcagctgtgcatgatgatcgtcatgataggatatggcattttctttttcaaggaccgcacctgccggatctggtgctttggcggcccggccgtgctggtcaccttttggtcagccgccgtcgtctattactatacggcctacctgttcctgacgattttatgtttcctcatggctttttttctgggcctggggctgggcctgtggttcaaggcaggcctgcctgaactgacctattgccgggcacggcacctgctgcggtgtccgcccatgccgggagccctgccgttcaatatcctgatctgtctggcctttgcggccatccaggccggagtctatcattttccgtttttgatgtattcctggctgttcaacgaagtcctggggttcgtaccgggccttttcagcggcctgttatggggacggggactgtccatgctcctggatatcccgacgcgggggcagcaggtttataaagatatttag

SEQ ID NO: 2258 - DNA, 282 bp, Megasphaera elsdenii
ttgaagaatattactgctttttatctcaatggctgcccctattgcaagggcgctaaagaagccttggctgaactgatcgaagaaaatccggcataccgccagatagccgtcgactggtacgaagaatcggaacatcccgaagtcgtacaaggccattcttactactatgtcccgtccatgttcatcggtacggaaaagctctatgaagcccagccgggccagtcttatgacgccatcaaggctcatgtcaaagcagctctggatgcggctttgaaggcttaa

SEQ ID NO: 2259 - DNA, 1155 bp, Megasphaera elsdenii
atgaaattcagtctgcccaggttgcgtaactgtataatcgtctttatggccctgacttatctggcgggagcagatgccgtacagggcgcggactggcagtctgccggccggtccctggcggcgacacaggccgggacggcgacgttttatcagatggcgtcggatcttctctggcgccggtctgatgacaaccgtttcacggcctacaaggacctgctggaaccatctgatgacacgggctggtgggtcaagaccgattaccgcagctataccttcccggattatggcagcctgtcttacagccaggactatagtgcgaccctcatcggctacgaatcgccgcacaacatggcccgctggggcgggatcctccaccagggggctttttatacgatgagcacgtccaatgtctataccgacgggaaaaacggcagccagccctatggcagcgggtcggactcgatgaaagaatatggcggcggctttgccgtggaatggggcgataaacgcgaccgccatggcgatgccgtcatccgcctgtcgcagctgcagcataccgtgtcctacagcgatactgacgggaacagcgacttggtcaactatcggacctggctgttaggcgcgggcatccgttattatgaaacacggctcctgcccaagcagttcttctgggaaccccaggccggcctgtccctgggctatgtctttccttatacgatcagcggcgatgccgtgacttaccgatccgggaataagccctatgtaagcggccgcctgggcatcatggccgggaaagcctattcggtcaacggccatgccggcctgctctacggtcgcttcggcgtccagcgggctctggacggcacgacgacagggaccctggaccagggaaatacagcatctatttctggcgatgtcgggtccaagacgtatacctggtacgatatgactttcggctcttctttgtcgctgggacagggaaattctgtctggggcgaattgacgcggcggtccggctccaatatgacgccgacatggagcgtcaacggcggcctggtcctcaagtggggcggtgccagccggacgacgagggaacggatgaaagccctgaaaaaagacccgcacagcctcgatttggatattaagaaaaaataa

SEQ ID NO: 2260 - DNA, 633 bp, Megasphaera elsdenii
gtatccagcagaaatgagggaatcgaaatgaagatagcattgatcttgatggcgtccggctttggccggcgctttggcggccataaattagaaacactcgttcatggccgccctttatatacgtatggaatgaaaagtctgtgtcaggcggcacaggcttttttgccatgttccggcatcggttgccaggtgaccgtcgtgacagcccatgcggtcattgcctcggcctgccgggatcagggcatcgacgtcgtgtggaacgaccaggccggtgaaggcatggcggcatcgctgcgctgtgctgtcgaagcctgtcatgacgccggcgcctgggccttttttccagccgaccaacccttgctgacgtcagagacggttaccgattttctccggcagttcctggcctcgggtgcacctttgggctgtatgcataacggcgaacgccgttgcagtcccgctattttccgccgtatttatgggccggaattgcttcggttgcacggtgatactggcgggcgccaattcctgcgcagtccccagacctgggtttatcggccgaagcaaatagatgaattatttgatatagattaccaggaagatttaatctttttaaataaacaagaattaaaataa

SEQ ID NO: 2261 - DNA, 759 bp, Megasphaera elsdenii
atgaaattatatcttaatattttgaaaggtgtgactttcttgttcaacaagtctctcttaaaatccgttcagtctgccattgccgaacacccggacaagcgggttttatcgctttcatttgaaaataaaaagtatttcatcaaacgccgcaggggcaacggccgcaatgcctttgccaaacagaacccgtctgccgcgttctggtgcgaagcctataaaatcatgaccgtcaatgcccgcctgcgcctggcgccgaaactggtcctcctggatgaagacttcttcgtcatggaagcggccggcaagaccctgcagggcgtcgccaaagaagcagaatatgccgacgtccgccaggaggcctttgaaaaagccggccagggcctggcccgtctccacgccgccggactgcaccacggccggccggccctgcgggacatcgcctacgaccgggaagacgggacgattaccctcctcgattgggaaaacgaaaagaaattcgtcgacgcgccggcaccggtcctggacctgttcctcttcctgcacagctgtttccgcgaagaatggccggacaacgccctcatcgatgcggctgtcgccggttatggcagcgtcgaaggcagcgaccaggtattcacggcgctgaaagccttcatcgcagaccaccacactctcttcgcggtgtgtcacgccctgacccccttcggctggatcgacgtcgtctccgtagacaaggccaaagcctatatcgccgccttataa

SEQ ID NO: 2262 - DNA, 834 bp, Megasphaera elsdenii
atggaagttttcggttttattggggccagtggtaccggaaagagccatcatgccctggtcgtcgcctatgaccacgatatccagaccatcatcgacgacggcttgctcatcgaccacaaccgtatcgttgccggccggtcggccaaggaagagacgaaccgcctgaaggccgtgcgccgggccattttcaacaagcctgaagatgcagcagccatgcgggcggcgttggcgaaagtccatccgccgaaactgctcatcctggggacgtcgaaacacatgatccaccgcatctgccaggccttggatctgccggaagcgtcgcagttcatccgcatcgaggatgtatcgtgcccgtccgagatcgccaaggcccgggctatccgactgaaagaaggcaagcatatcatccccgtgccgacgatggaactgaagccccatttccagggctatctcctggacccgatacgctccttcttctacggccgtaacggcaagcagatttccaactttgaacggtccgtcgtccggcctgtcttcagctattatggcaagctgaccttttcgaacgaagtactggaagccttagtgcgccatgcgttgaaacaaaatggcggcgtcaccaagatcaaccgtctgcgggtggccatcaattacaattcaacgcgcaacggcctggctatcatcctgtccctgaccatcgcctatggccagaacatcaagaagctcatgagccgcatccgcaaggctatccagcaggaagtagaatacacgacgggcatggccgtcgaaatcctcaagattacggtccgcggtatttcccagccggaacactag

SEQ ID NO: 2263 - DNA, 1560 bp, Megasphaera elsdenii
atgaaacaatggttcttaaaaaatcggtacggcttgaccgtcgccttagtggcagcaatcatcttgctgccatttttaggtgctgcgcctctcatggacccagacgaaccggtctacggcgaaacggcgcgggaaatgctgttggccggggattggttgtcgccgcgcattttcggccaatattggtacgataaaccaccactcttctactggctggaaatgctgtcatacagcttcttcggcatttccgacatctcgtcccgcctgcccagcgtcatcatggccctggccacgacactgtacgtctatgtccaggggaaagaattattcaataaacccatcgccttcctctcagccctgctcctggtgaccagtgcgggcttcatgtatatcggcaaggccgccgtcaccgacatgaccctcatgttcaccctgacggtgacgatgatttccttttaccgtaaaaagtattatatagcctatattttctgcggcctgtcactcctggccaaaggccccgtcggctatgccttcccggccctgatcatgctcatctacctggcctggacacggcagtggacgctcatgaaacacatgaagatcccccagggcatcctgctggcttttgccgtcggcctgccctggtacttcctgatgtataaggtccacggcgaagtcttcctggacaccttcatcggctatcacaacatcacccgcttcgccgcgccggaacatccgggccagaacagtattttcttcttcatccccatcctcttcgccgctatgatgccctggacagcggccttgttcccgacgctctggcgactgttcaaaaaacgggaccccttccgggatacgctgcagtactgcctggtctgggccgcgttcatcttcctcttcttctccttctccaagacccagctggtcacgtacattgcccccatgtttccgccgacggcttacctgctgggctggtacggctaccgctgctatatcgaacgaaaattctcacggcccctgctcctgaccttatatttcctggggctggccgtcctagcctgtaatgccatccccctccacgaggaagcgtcctttttccgtccggccatcctctggggttcctgcctgctggcagcggccttgttcctgccggcggtctgcttatggcgccattattatcgagccgctttcatcgccggcatcgtgaccatgaccgctttctcctgggccgttttcggcttcatcattccccagttcaaagaccatgtcacctcctatgacacggcccagatcctgccggacgtctacgacggccattccatgctctatatcgaaaagttcctgcgcccgggtatctcctattacagcggtatgtacgggcgcgagtgggaccccgtcaaggacccggacctggaagccttattacagacaaaggataagattttcctcatcatgtcgaaatcgacgttccacaaactggccaagtcccaacacttgatcgaccgcttcggtatcgccgccgaaacgccgacgcaggtcatcctcatcaatcatccctag

SEQ ID NO: 2264 - DNA, 162 bp, Megasphaera elsdenii
atgggacattttctcttgaatcatttccgccatgtccacgaaaagtcagaacacatggatgattttgaaaactttttgtatatcctgacgtacatcttgtttgtctgtctgttcatccgctccctggtcgccttgtacatgggacggtggaacttgttctaa

SEQ ID NO: 2265 - DNA, 996 bp, Megasphaera elsdenii
atgaagactttgaataaatggatccacgatttacccgctgacatcggggcgtctgccatgcctctcgacagggtgccgcagctggcccggaaagctcgcgtccacatcgtcgccttaggcgatgtggggacgaccatgctcatcggactgctcctggccgggcaggacgtcatcgcttccgtcggcatgtgcgacatcaatgagaagaacctggcccgtctggaaatggaaatgaaccagattcgctatccctttgccggccaggaaggctgtccggacccggtcctgccagccgtgacggtcgtcggggaagaagacgtcttcgactgcgacgtctttatcttctgtgccagcaagggcgtgccgcctgtcggagccggcggcgatgtacgcatggcccagctcgaagccaaccgcagcctcatcgcccactatgccggcctggcccgccaggcgggcttcggcggccaggtctgtatcgtatcggatccggtcgaccccttgtgccgggccttcttgacggaatcgggcctccatccggcccagatccagggctatggcctgggcgtcatgcatgcccgggcctgctattacgccaggaaagatccacgctttgtccattatctgacggaaggccgggcctttgggccccatggggcggacctggtcatcgccgacagcctggaagactacgacgacgccttgtcgcgggagctgacggacctcgtcgtccatgccaacgtcgccgtccgcgacctgggctataagccctatatcgcgccggccctgtcgtcagcggccctgtcgatcatcctgaccctgcggggccagtggcattatggctcggtctatctcggcgatgcgtcgaagggagcctttttcggcgtcaagaaccgcgtcgccggcggccaggtgacttatgaagacgtttgcgcctgcccggccctgtacgaacgctggaagcgggcctatacggcgttgagccgcctcgtctag

SEQ ID NO: 2266 - DNA, 354 bp, Megasphaera elsdenii
ttgaagataaaagatgtcagtgaaaaattccagatttcgccggatacgctgcgctattacgaaaaaatcggcctcatccacaacgtaagccgtgataagaacggtatccgcaattacagccaggaaaactgcaataccattgccttcatcaaatgcatgcgcgcagccagcgtctccatcgacggcctgtcgcggtatatggaactctttcagcaaggcgaggcgacgcgcaaagaacggcgtcaaatcctcacagaagaacgggaccatttagaaagccgcatgaaagatattcaagaggccctgcagcacctgaactggaaaatcaagatgtacgatgaagggaagttctaa

SEQ ID NO: 2267 - DNA, 630 bp, Megasphaera elsdenii
atgaaaattgaacatattttgccggccgatatcgaacggcgcagcatggaaatcattgaagacgaattaggcgacatcatcctgccgccggacgaaaaagacatcatcaagcgcgtcgtccacaccagcgctgacttcgactatgtccgcaacctgcgcttcagcccaggcgccgtcgaacaggccctgaccgccttgaaatcgggctgtactatcgtgaccgataccaatatggcctgcatgggtatcagccagccaggccttgagaaactgggctgccgtaaagtctgcttcatggccgatgcagatgtcgcggcggcggccaaagcccaggggacgacgcgggcccaggcttccatggataaagccgcagccctggaaggggcggtcatcgtcgccgtcggcaatgcgccgacagccctcctgcgcctgcgggaactcatcgacgctggcaagatgaaaccggccctgatcatcggcgtccccgtcggtttcgtcaacgtcgtctatgccaaagaaaccattatggaagccggcgtcccgtatatcgtcgccaaaggacggaaagggggcagcaccatcgccgccgccatctgcaacgccctcatctatcgcctgatgagagggtag

SEQ ID NO: 2268 - DNA, 861 bp, Megasphaera elsdenii
atggagctgactgtccgcgtccccggttcgtgtggggaagtgatgcagggtatctggcaggatgagcccttcctgatcacgtgtcccatcgaccggtacagtacggtcgtcgtccgtcccggcaggggacggctcctgggcggcggggaaaaggcccgtcgggctttggacctgggccggacatattgccggtgccaggaccttccgtatgattttttcctgacgtcggatctgcctccgggcaagggcatggcttcaagttccgccgatatctgcgcggtcctggccgccgtcgccaccgtttgccaaaagtcactttcccagcaggacataggccgtctggcagcttccattgagccgacagacggcattttttgtcagggcatggccatgatacagccggaaacaggggctatctggcacgtgtttcccgaggtgccgtccctggctattgccgtcttcgatgtcggcgggaccgtcgataccgtcgctttccaccgggtccatcgggaccggatccggccggtccaggcgcctctttttctgggtctgcagctcctgacggcttccttgaccgaccgccacctggggctggcggcttctctcagtgccctggccaatcagccgtggctgccgaaaccggattttacggcttttctccaggccgccctggatcatcctgccgtagtcggcgtcaatgtggcccacagcggcaccgtcgccggcgtcttctttggttgtgaagcttctccggcatcccgggaagcggtcattgacaccctgtgccggcagttcccgcagtggtcctatcgggaaacggttcagttgcagccgggcggtatttttacagaaatcaggtga

SEQ ID NO: 2269 - DNA, 936 bp, Megasphaera elsdenii
atgaaacgtaatctgactatcggtacgcggcgcagccagctggccctgtggcaggccaactacgtcgccgaaaccctgcgccggcacgacccggaactgaccgtccagctccagcacatcgtcacgcaaggcgacaaaatcctcgatgtccctttggcccgcatcggcggcaaaggtctgttcacgacagaactggaacaacgcctcctggatggcaccatcgacctggccgtccacagtctgaaggacctgccggcggacgttccggacggcctctgcctggcagccattacggcccgccaccatgtccacgacgccttcgtttccaatacctatgagtcccttgaagccctgccggccggtgcccgtatcggcacgtcgagcctgcgccgcaaggcccagctcctccacacccggcctgacctgttcgtcgccgatctgcggggcaacgtcgacacgcgcctgaagaagctcgacgacggccaatacgacgccatcatcctggccgaagccggtctgcagcgcctgggccgggccgaccgcatcacacagctcctgcccgtcgatacgatgattcccgccgtcggccagggcgccctggccatcgaaacccgcgcagacgacgaatcgttgaaacaggccctggccttcctcaatgacgaaggcaccgccgcggcgacgacggccgaacggacctttctggccgccatcaacggcacctgccaggtcccggtcggcgtctacggcaccgtccaggacggcatcctgacgctgcagagcatcatcgccgctcccgacggcagccaggtctgccgcacgacgacacgcggctccgcggcggacagcgccgccatcggccacgaggccgcctgcacactcctcgacgacggcggccgccgcatcctcactgatttgggcatcatcccgacctattaa

SEQ ID NO: 2270 - DNA, 1056 bp, Megasphaera elsdenii
atggaaactttatttgaccgactttatcatgaattacaggccggccagccggctgtcctgctgaccgtcgtcgccagccaagggtcgacgccgcggggcatcggcagccatcaggccgtctttgctgacgggacgacggccggtaccgtcggcggcggctatcaggaatacttggccatccaggccgggaaacaatgcctggcccagcagcaatcggctttccgccgcctcatcctccatcccaacgacgaagaagacatcaacgcggcctgcggcggcgaattgactgtgttctgccaatatctcgacccggctgaaccggggctgctggacctgctgtcagtcatccttcaggccctgcgccagcagacggcgtcgtggctggctctcgatgtcagcgatgaaaggcaatggggcatggccctggtacgggaaggggctgtacaaggctgcggccagatgggctccttgcaggctgtcgatgccgcctggtgccggcagaacgtagccggcatggccggcgacggccagcgccgctggtatagtgaacctctggcctatccggggcgggtcttcatcttcggcggcgggcacgtttcccaggccctggtcccggtcctggccagtatcggcttttcctgcaccgtcgtcgatgaccgggctgaatttgccgacccggccttattcccgcaagcagaagccgtctatgaggccgattatgaggcccttccggcagacctgggcgtgacgccggacgattatgtttgcatcatgacccgcggccatgtcggcgactacgatgtccagcgccagatgctggctatcaagccctattacctcggcgtcatcggcagccgccgtaaactggcctttgtcaaagaaaagctcctggccgacggatttacggccgcagaaatcgacgcctgccacgcgccgatcggcctggccatttcggccgtgacaccggcagaaatcgccatcagtatcgcggcggaactcattgccatccgggccaagcgggaaggccgagaaaagagccgctaccacaagccatga

SEQ ID NO: 2271 - DNA, 678 bp, Megasphaera elsdenii
atgtttgctgtcatcgtcaatgccgtgacgtcttctttgggagcgttactgggattttttttgaagcgcggcataccggagcgctttaccaaagctatttttggcgtcatttcgctgtgtgtggccatcatgggtatacaaggggccgtccagagccagaatctgctcctggtcctggccagcatggtcatcgggaccctcgtcgggacgctcatcggcatcgaagatggcatgaaccgcttcggcgaatttctcaagaaacgcatgggccgcggagatgactcgcgcttcgtccggggcttcgtcaccttatccatcatgcaggtcatcggcgccatggctattatcggtccagtccaggcagcgctgggaagtaacgaccttttgtatttcaagagcgccctcgattttacatcgtcctttattttcgggactctttatggcttaggcgtcgttcccgtcggtatcgtcctctttatttaccagggatttttctacctcttggcgaccttcgtcatgcccctcatgacaccggatgtcgtccgtgaactcaatgccgtcggcagcgtcatgatcctgggcatcgctctcaacatgttccagctgacgaaattgaaagtagccgacttcctgccggccctgttcatacctatcatatactatcatttaatcgtatga

SEQ ID NO: 2272 - DNA, 852 bp, Megasphaera elsdenii
atggtggcagtcgacgagtccccggctgaacggggcgccccggcagaaatcgccgtagaatgtattgtccccaatccccatcagccgcggcagacctttgatgaacaagggctggccgttttggcggattccatccgtcagcatgggcttgtccagcccgtcgtcgtccaaaagaccggacctggcaggtatgaactgattgccggcgaacggcggctgcgggcagcgaagcgctgcggcttgaaaacggtgccggccatcatccgcaagtatacgccggatgaagcggctgaaatcgcccttgtcgagaatctgcagcgcaaggacctggatgccattgaagaaggcctggcttatgagcggctcatgaaggacttcggcttgacccaggaacagacggcgcagaaagtcgggaaaagccggtctcacgtggccaacatggtccggttattgcagctgccagctgacatcaaggaatggattgcggcgggacgcttatccatgggacaggcccgccctcttttacagctgccttctgcgaaattgcagcgtgaagcggccctgcacattttgaagcatgatctgtcggcccgcaaggccgaagccctggtgcgccatttgatgagccaggccaagcctcgtccggagccggatgctcacctggcctggctgcaggataagctgaagatgtccttggggactgacgttgccatccaagtggggaaggaccggaaaagggggaaaatcgagatttccttttcttcggaagcagaatttgaacggctgctgtcgatccttaccgaagaaaaagaagacccatcgccgtcccctctttcttcgtttcacatataa

SEQ ID NO: 2273 - DNA, 231 bp, Megasphaera elsdenii
atgagagaattaccaaaagcccatgaaatttggcgccatttcaaaaaaaatacttatgaaatcatcaccattgccgaacatacggaaaccggtgaaaaatttgtcatttacaaggccttgcacgatacgatgaagacctatgcccgcccgttgaaggatttcatgagcgaagtcgataaagaaaaatatccccgtgctgaacaggattatcgtttcgtcaagattaaataa

SEQ ID NO: 2274 - DNA, 681 bp, Megasphaera elsdenii
atgaacgaaaatacacacatcttaatcgtcgaagacgaaaaacaaatcgcccgtttcctgcaaatggaattggaacatgaaggctacatctgcagcatcgaatacaacggagccgctgccctggaccgcatcggtcaggagcacttcgacctcatcctgctggacatcatgctgcccgacgtcgatggcctgaccatctgcaagcgaactcgggaattatcgaatatcccgatcatgatgctgtcggccaaagacgacatcgaaacgaaggtcgtcagcctggacatcggcgccaatgactatctgaccaaacccttcaacagcaaggaactctttgcccggatccgcgtactcctgcgggaacgccatcagttagcggaccggggaaattttctccagctgaatgacctcaccttatttctcgaccgccatgaagtcatgaagggcacgaagaaaataaaactgacgaaaaaagaatttgagctcctcgcttatttagtccggaacaagaacatcgtcctctcacggtcgcgcattgtcgaagaagtttggggctatgattacatcggcgatacgaatatcgtcgacgtctatatccgttacctgcgcagcaagctgggaccgaatgggcgcacctatatccgtacggtccgtggagtcggttatgtggcagaagattaa

SEQ ID NO: 2275 - DNA, 633 bp, Megasphaera elsdenii
atgggattttttgatgccttttttaaagaacaccagagaacgaagagcgaggaaatctatgacaaggccttgcagattttcaattcgccggaattacagaatcaggccctgtcaggaaaactggccgacaaggtgacgcatggcgaagattgcgacatcattccaggttcatatggtcgttttggccacgataggaccaatccaattcccgtcaatggaccgagtggagaatttgtctacttatcgcgcctgcgcctgcgccggaccggatcgatggtctttttccataaagccggcagtgtcgacggcatcgatgtctttgaactgaccaacgtcagcggcaagttcgtcgaccgcctgtatgtcgacatgtaccacccccgctgttcccgccgctatccggaaggctatacgctggaaaaggaagctgtctttccccgcggcgtgacgacgaacctgcccgatttccccaaaggactctacaaggccatcaaaaaagaagccaagcagcgcctgggcatcgacgtcgctgataaagaaagcgattgcatcgatgtaccggctgtccaggaggcgttagcccatctgcggaaggaaaggccggtggctcctgtcatgaagccattgaaataa

SEQ ID NO: 2276 - DNA, 807 bp, Megasphaera elsdenii
atgctcgtagacttacacatgcacacgacctgctccgatggtgtctatacaccggagcagctgacccggatggctgtcgatgccaagctcagtgtcatggccatttctgaccacgataccgtcgccgcctatgatggcagccattcttttgcgccaggcgtccgcgtcatcccggctattgaaatcagttcggaatgtgacggcgaagatgtccatatcctggggtacggcattgatacggctgatgaagggctgcaggcttactgcgcccagttcaaggaacggcgcttcaacagggccttggaaatcgtcgaccgctgccgggcgcttggttatgatatcgaccgcagcgccatcgaagcgacgctgcgacagggcggcaccgtcggccggccccatattgcccgccagctcgtggccaaaggctatttcccggacgtcaagacggtctttgataagctcctctatcgcgggggtccagcctacgtgccgtatcaccgccgcagcatcgacgactgtgtcgcccttatccgccaggccgggggcattgccgtcctggcccatccgggactgctcaagcggacgctggaccaggtcctggcccatgactttgacggcgtcgaagtctatcaccccaagaaccgcggccgttataaggaatttttgaaactggccgaggaccgtcattggtacgtcagcggcggctctgatttccacggcacgacagggcgcttcccggaaaaggtcggcgttttcaccgtcgatgcccaagctgtaaaagccttactgaatgatgtaaaaggataa

SEQ ID NO: 2277 - DNA, 936 bp, Megasphaera elsdenii
atggataagttacgcattgtattcatggggacgccggatttttccgtcccgtccctggaaagcctggcccaggccggttatgatatcgccgccgtctacagccagcccgacaagcagcggggacggggcaaaaaggtgactttttcgccggtgaaagaaaaggccctggaactgggaatccccgttttccagcccgattccatgcgccgtgacgatgtcatcgaacagctgcgcagcctggcaccggatgtcatcatcgtcatcgcctacggcaagattttgccgaaagccgtcctcgacatccccaaatacggctgcctcaacgtccacggctcgctgctgccgaaataccgcggcgcggctcctatccagtacgctgtcaaggacggcgaagctgaaagcggcgtgaccatcatgctcctcgatgaaggcatggatacggggaagatgctgaaaaaagcggccattcccctggatgccaaggaaacgacgggcactttgttcgataaattgtccctcctcggggcccagaccctgctcgacgtcctgacggacctggagggctatgaaagccgggctgtcgcccaggatgagagccaggcgacgtatacggcaaaaattaccaaggaagaagcccagatcgactggacccaggatgctgtcgtactggaacggctcatccggacgctggatcctcatcccggcgcatatacgatctgtcacgatggcaagcgcctgaaaatctggtcggctgatgtcgtcgaaggtaccggggccgaaccgggaaccatcttggatgtgaccaagaagcagttcaccatccagaccggaagcggcgccctgcgcatccgcgaagtccagccggaaagccggaagcggatggctgctgcccaatatctccagggtgtgaccttgacggctggggaacggctataa

SEQ ID NO: 2278 - DNA, 900 bp, Megasphaera elsdenii
atgaaatcatatcatcatatcctcgtccccatcgacgggtctgattatgcaaaacaagccttacaacatgccatcgatattgccaaactgaccggcgcttcgattacgctgctgaacgtcgccaatatggccgacatcatcaatcagttcagtcaaatggaaaatacgagcgaattgacaatagacaaactctccgcaactgctcaagccaacagtacgggcttattgaaagaattcgccagcctggtcccggcgtcgattccggtccaatccctttttgaactcagtgccccggaagtatcgattctacaagaacaaaaagctttgccagccgacctcatctgcatgggccgcggcagtaaacagcctctcaagaatttcctgctcggcagtgtcagcacctatgtcattacccacgcaccgtgcccggtcctcctggctcacgacgaaaagaaagggccgtaccgtcacatcctggtacccgtagacggctcggaatcatcgctccaggccctgaagcaggccgaaatcctggccaagggagatcaggcttcgctgaccgtcctttacgtcgccagcatcagcgacagcctgcacgatacagcagtccccgatacgatggaaccgcataaactacaggaactggcagcccacatgcggtccaaaggccataacgccttcctgcgctgccaggaacaactatcgtctgacctccccttacaatgtctttataaaatcggctctcccggcccggtcatcttgcagaccgcagccgatattgatacagacctcatcgtcatgggcagccgcggcctgaaccgcatccaaagcgtcctcttaggcagcgtcggccgttacgtggcctctcattccggtctgcccgtcctcatcatccgctaa

SEQ ID NO: 2279 - DNA, 963 bp, Megasphaera elsdenii
ttgaatttagaaacgagagggacgggacgacaggtattgtctattgtcgttccagtatataacgaacagccgaacattgagaagttctatgaagaggcgacgaaagccgcagcgacactcgatatggactatgaaattatctttgtcgacgatggttccaaagatgcgacacccctcatcctcagccgcctgacccagcaggatggacacgtacgggcttttatcctggctcgtaatttcggtcatcagctggccattacctgcggcatggatcatgcaattggcgacgccgtgatcaccatggatggtgatttgcagcatccgccatcgatgattcctgaactggtccggaaatggcgcgaaggcaacgatgtcgtccagacgatacgtgaatcgacagacgatgcgggtttcctcaaacggatgacgtcgaaatggtattaccgtatattgaatactgtatctccggtccacatcacaccgggcggatccgatttccgcctcatcgacaaaagggtactggaaacattcaagcagttccgcgaacacgaccgcttcatccgcggcatgatcggcgatatcggctatgcccagaccttcattcatttcgtagcgccgaggcgctatgccgggaaatccaagttttccgtgcgcaagatgctgcattttgccctcgacgggatcatggcttattctaagattcccctgcgggtttccttttacgtcggcatgctgagcggcttattgagcctgctactgatcctgcatgtcatttactgtaatatcgtgggcgaagccgtacagggctggacgacgacgatgatcgtcgactgcctgttcagcggctttcagctcatttttatcggtgtcatcggagagtatataggacgtatatttgaagaggtaaagcatagacctctgtattggctgcgggctgaactcggccagcataaagacaggtaa

SEQ ID NO: 2280 - DNA, 486 bp, Megasphaera elsdenii
atgatagaaattcaatttgccgtcatcgtcctgttgattgctatgaccttggtcctgagccggtactataatacccgattccgtgccttggaagataagatgaaggatgtcgccgattttcagcagagcgtcaaagacctggcagaagccgtccaggacttgaaggaagctgtaaaatctgaaaagacggtccagccgcaatcgacacaaccggaaaaacaggaactgacccaccccgtcgtccctgtcggccagcgtcagccggctgtcgtagcggcccggccgatgaccgtcgtatcagacgggaaccaggccactccggaaggggagctttcggatgaagtcgtcgccgtcatcatggctgctgttgccgcctatggctattcaccggcagctatccgctctatccgtccgcagaagcgcggttataaacgccatcgggaaaattgggctatggcagcccgcctgggtggcatgagtcgttaa

SEQ ID NO: 2281 - DNA, 675 bp, Megasphaera elsdenii
atgaaattttcaccgcctttgcagggactccatctttccttttcgctcgacggacggtatcgctggatctttttcatccttgtcgtcctcatccagttcgccgtcgtcgcctatatgggatggcgctggcataacatcgctgtcgatgggatcccttatcagtggcgctgcgttccccgtctggaagtagcttctttcgggacggattatgtccgcgtcgtcttccccgaagatacgacccggtggcgggacgacacgccgccagaaacgggacagcagatttatgtttatatttcacgggatgcttcaggccttatggaaatccagggggcttcggcatccaagcctttcgtcggcggcgactatatgcaggccaccgtcgtttcctatcaagatggctacgtccagttccaggtcggctttgaccgctaccgcctggctccggaactgaccgatggcatctatgggctccgccaggatgacaacatcatcgccagtatccgcatcaagcggggggaaggcgtcatcgagggcatcttcgtcaatgggattcccttggcggatatcagcaatggcgcggccatggccaaggcccgccaggagaaagaggcccagaccttatttgaccggcctcatctcgtcgataccggaatggtaccgccgaaagaagaatga

SEQ ID NO: 2282 - DNA, 660 bp, Megasphaera elsdenii
atgggagtttttgatgtggtcggtcccgtcatgatcgggccttccagttcccacacggccggagcggcccgcatcggcctcatggccagggagattttaaaggaagaaccgaagaaagccgtcatcacggtctacggttcgtttgccaagacctataagggccacggcacggaccgggccctcgtggccggcctgctgggtttttcggccgatgatgtccggctgcgcacgtcttttgcccttgccgaagaacagggcctggctattgaatttcatcggtctgatgaagaagtggaccatcccaatacggtacgcatcgccatgaccggcgcctcgggacggcagatggaagtcctcggcgtctctttgggcggcggtaagatcgagatccgcgagatcaatggctctgaagtcgccttgaatggggaagaacacacgctgattacggtccataaagaccagccgggcatcatcgcccaggcgacgacggtcctggctatcggccatatcaacgtgtcgaatatgcgcgtcttccgcagcgctaagaatgaaacggctgtcatgatcgtctgcacggacagtcccgttcctaacgaaatcgtccacatgatacagaatattacggccattgagagcgtcgtcacgctgctgccgctctag

SEQ ID NO: 2283 - DNA, 423 bp, Megasphaera elsdenii
atgagttggtggcgcgatattttgcggcaaagtgtcttcatgtgtttctttatcattcccatcccgattggagcctataccatccacagcggttccagtgccgtcgtggccatggtcagttatgtttttttgtccctggtcatccccgtcgcctacgtgggctgccaggatgcgtcttttggccctcagggcgggcggatcctccgctgggtcatggccctcatgtggttcatcgtctttgcggctatcggggcttttacggctttcatgggcgtctattggaaggcagctcctttctgggaatggccgaccattggccgtgatgtcgtcttcatcgccggcatgtatggggaaatcagcctgaccatgctccttgcctttgtcgtctcccagctcttgccaggccgaaaggaagtaaaataa

SEQ ID NO: 2284 - DNA, 1482 bp, Megasphaera elsdenii
atgacagaaaattatatcgatcattttttgaaccatgtcctgccggaattgcgcattgccgtcatcggtgacatcatggtcgaccgctatgtgttcggcaaggtcgaacgcatttcgccggaagcaccggtgcctgtcaataaagtcgatcacatgacgtccgtcctgggcggggctgccaacgtagcctcgaatctggctaatctcgactgccacgtcttcttggccggcctcatcggcgacgatgaaaatgcagtcctcctgcaccagctgctggaagatgcccatatcgacggctcgggcctggtcgtgcgccaggaccatgcgacgacgaccaagatgcgtatcctcggcgcccgtcagcagatggtacgcctggattttgaagaagtgactcccttggccgttacggaagaagaacagctcatgaaatggctgtacaactgtgtggctgccggtctggacggcatcatcttatcggactacaagaaaggtgtcctcaccgattccctggcccagagcatcatcagagaagccaaccgggccggaatcactgtcctggtcgaccctaagggcagtgattggacgaaatacaacggggccgacttcgtgacgccgaacattaaagaactcagcgactgcctgggccggtccgtagccaatgaaggccaggccgtcgtggcagcagcagaactcctgcatgagcagtatgactttgcccacctcatggtgacccggtcggaaaagggcatcaccgtcatcggcaaagacggcaaggtgtggaacaatccggcgacggcacgggaagtctttgacgtatccggtgccggcgataccgtagccgccgcctttttgtcggccattgccggtcatttatcgatccgcacgagcctgcagattgccaatgccgcagccggtatcgtcgtcaccaaggtcgggacttatcccatccatcgccacgaattgctcaagctgtggcaggaatggcagccgacccactggcatccgtatcaggcactgagccgggaagaagcggctgcaaagatacgccagtggcagaagaaaggcgataccgtcgtctttaccaatggctgcttcgatatcctgcaccgcggccatgtcctctatttgcagcaggccgccatgctgggccagcacctcgtcgtcggcctcaattccgatgcctctgtgaaacggctgaaaggggaaacgcggccgctggtcaaacaggaagaccgggcgatcctgctcagcgccctggcctgtgtcgatgaagtcgtcatcttcgaggaagatacgccgaaagaattattacaggtcctgcggccggatatcctggtcaagggcggagattataaagccgatgaagtcatcggccgggaatcggtcaagcgcgtagaaatcatttcttttgaagatggttattctacgacgggactgattgaaaaaatagctgatttagtaaagaaggggaaactatga

SEQ ID NO: 2285 - DNA, 390 bp, Megasphaera elsdenii
atggacagacataagtccccggccttcctggccgggctccgccaaaaggaacagcagggctgtgccgccctttcccacctgcgccgccgtttctgccaggcctggcgcggtctccccaaggcccagaagtgcgtcgtcctcgtcgcccttctggagttcctgtggatcgccgccctccagttccaggtctatgagctggcagacacgatctccatgcagcgtgtccgcatcgcccagctggaaaagcaggctaaaaaacaaaataatatgttatattctgcttcacaaacactggatgatatcgaaaaaaaatggcatcgcctcaatttccgcgtcctggaaaacacctggcgcatcgaagaacccgaaaaagacccggactccttatga

SEQ ID NO: 2286 - DNA, 1287 bp, Megasphaera elsdenii
atgaagcgaagggattgggatggctattttgcctcccttattggcgacagcgggacctgcgtgcccggcctggccgtcctggcctatgccggcggccgtgaggtctaccgctttgccggcggtgtccgccgcatggccggggcacagacctggcccatgacggaagacagccgtttccgcatggcgtccgtctccaagatgttcacggtctttacgattatgcagctcgccgaagcagggaagctgtccctcgacgaggatgtcggcgagtacctcggctttcgcctgcgccatccgtcgtatcccgacatgcccattacgctccgcagcctggcttctcatacgtcgggcttgcgcgacggcaaagtctacagtatcccgccatccgtcagagtccgggccttctttacgccaggcagtccctattgggaaggcggcgcccatttcgcgccggccggacaggcaccgggcgcttatttcacctattgcaacctcaactacggcctcttggggacggtcatcgaagccgtgacgggccagcgtttcgaccagtatcagaagacccatatcctgaaggacctggaatgccgggctgattatgtgccgggcaacctggaagcgcctgagttcgcccgcttagggacgatttaccgcaagcaggatagacagggacggtgggaggaaaaaggcccctggcaggggattatggacgattttggcggtgtccagccgccaagggagaccctgtccctgcagaatccctatgcccaggacgtctgtcagacttacgacctggccggttatcagcctgggaccaatgcgacgattttttctccccaaggcggcctgcgcctgtccctggaagaattgggccacgtcctggcgatgcttcttcacgacggtcgttacgccgggcggcaggtcctccggcccgcttcgctccaggccatgttcagcccgcaatggacctatgacggccacaatggcgatacgtgcggccagaccctgctgacctatggcctgggcgagttcttcgtcgacggcagagggccggcccgctgctgccgtaccaaggccatcgatttatggggccatacgggccaggcctttggcctcttatcgggccttttcatccgtcccgggacgggaagcggctttgcctatgtcatgaatggggaggccctggccgaagacgacgacccgcgcagtgccggtcagttcagccgcaattatatttgggaagaaaaggtcatggacggcctgtgccggttgattgacggcctataa

SEQ ID NO: 2287 - DNA, 1254 bp, Megasphaera elsdenii
atgaaggaaatactcgtcattggtgccggcgcggccggcatcatggctgcgctggccgcggcagaagcaggggccagggtacatttatttgaaaaaaatgatattgttggcaaaaagctgggcattaccggcaagggccgttgcaatctgaccaattcctgcaccatggccgatttcatcgcccatacgccgggacacggcaagttcctctacagcgcttatgaaaagttcaccaaccaggacctgctcgacaagctgaatgcctggggattggccaccaaggaagaacggggcggccgtattttcccccagtccgacagtgccatcgaagtgcgcaagctcttataccgcaagctatgccataaaggcgtcgacctccatctgagcgatgtcgtccacgccgtcaaggcctggggcagccgcatggtcgtcagcgccgcctccggaaattatgaaggcgacgcctgtatcatcacgacaggcggcatgtcctatcccgtcaccggctcgacgggcgacggctatgactttgcccgcagcctgggccatagcgtgacggaactgaagccggccctcatcccctttacgacggctgaaacctggccgcataccttgtcgggactgtccctgcgcaatgtggaaggctcgctgtggaagcggggcaagaagatggcttcgtatttcggagaaatgctctttacccatttcggcgtatccgggccgatcatcctcatgctcagtatggccgcggcccataagaaggcctgcaccttccccatgcagctgcgcctcgacctcaagccggccttgtcaaaggaaaagctcgatgcccggctgcggcgggactttgagaagtacatccgcaaggaagcagcgaacgccttgaaggatctcctgccacagcggctcatccccatcgtcctcgaccaggccggcatcgcccgggactgtccggtcaatcagatttcccgggaacagcggcaggatctggccgatactctcaaggccttgtctctgacggtgacgggcacgcgtcctattgaggaagccatcgtcacggccggcggcatatcggtcaaggagatcaatcccaagacgatggagtcgaaacttgtcccccatctctattttgccggagaagtcatcgacatcgacgcctttacaggcggctataatctgcaagcagccttttcgacgggcttcgtagccggaacggcggctgctacaaaggagtgcataccatgcgaaaattaa

SEQ ID NO: 2288 - DNA, 171 bp, Megasphaera elsdenii
atgataccgattaaagcgactcttgtttccatatttatacctcctaaagaaaaagaggctgtcggacagcctctttttaagtttgatgttgaaagtttgatgtttgatgtgactggttttaaatttaaaagccatcgcctcaagcatcatacatcaaacctcaaacattaa

SEQ ID NO: 2289 - DNA, 987 bp, Megasphaera elsdenii
atgatgaaagaaatagagataatggatatggcccggacgaatggcttccgcctgggcaatgcgcaggaccgccaaggcggcacgggctgcacggtcttggtatttcccgatagcgcgccctgcgccgtcgatgtccgcggcggcggcccggccagccgggaatcggaactcctcagtcccatggcggctgcgtcgggcatccacgccatcctgctcagcggcggcagcgcctttggcctcaatgcctcgacaggggtcatgcagtacctggaagaacagcacatcggcttcgatacgcgtatctgcaaggtgcccctcgtcgtcgagtcgtgcatttatgacctgggctgcggcgacaacgtccgtcccgatgcggccatgggctatgcggcctgccaggcagcggaaacgggggacttccgtgaaggctgctacggcgccggcacaggggcgacggtcggcaagctctgcggtccggactctatgatgaaatccggtctcggcgcttatgccgtccaggtcggcgacctccaggtcggtgccgtcgtcgccgtcaacgccgtcggcgatgtcctcgacgaacaggggcagatcctggccggcatgcgcagccgcgacggccagggctttgccgacacgcggcgggtcatgctggaagaagcggggcagacgccgaccctcttttcccagcgcgccgtcgggacgacgaccaatacgactatcggcgctgtcgtcaccaatgggcggttcgacaaggcccagctcaagaaaatcgccgccctgggcagcaacggcatcgtccgcgccatccgtcccgtcaatacgacggctgacggcgattccctctatgcagccagtgtcggcagcgtttcggctgaattgagcctgaccggcaccatcgcggcctacgtcgtagaaaaagccatccgccgcgccgtctgccaggctgaaagcctgtatggcatcgaggcgtgccaggatgtttga

SEQ ID NO: 2290 - DNA, 1440 bp, Megasphaera elsdenii
atgaaaacaatcataggcaatgtcatgccagaagaaacgcgcatggcgatcctggaagatggccgtcttcgcgatttcgccgtcgaacgcaatgacgacatgcacatcgtcaatcatatctacaaggggacgatccagaacatcctgccgtcgctgcaggccgctttcgtcaacatcggccgccacaagaatgctttcatctatatgggcgatatgttcccgcgggcggcgtcgaaagaggaaatccagcagatgcacctgtccataggtcagtcggtcctggtccaggtcatcaaggacgaacagggcatgaaaggacccaaagtcacgaccaatgtcagcctggccggccgttatgccgtcctcatgccgacggtcgattatatcggcgtctctaaaaaaatccgcgacgaagaagaacgcaaccgcctgcgccgcatcgtgtcggaaatcaagcctgccggcatgggcctcatcatccgcaccgtcgccaaaggcgtgtcccgggaagaactcttaggcgacttgaagtatctcctggggacctgggatagtatctgccagcgctataagctggcccgcaagccgaccctcttatatcgggaagccgacttggtcatgcgcatgatccgcgaccatttcacagccgatgtcaagcaagtcgtcgtcgataaccgcgaagcgtatgaacggatctgccaggtcttcccggacccggcctggcgcagccgcgtccgcctttacgaaggcgtcgcgcctatttttgaacactatggcatcgaagagagcctgaaagaccttatgtcgcgcatcgtgcccttgccgtcagggggcaatctggtcatcgaccatacggaagccttgacggtcatcgacgtcaacagcagcaagtataccggcaacggctcgaccttacaggatacgattttccacgtcaataaagaagcggctgtggaaattgcccgccagttgcgcctgcgcgatattggcggcatcatcatcatcgatttcatcgacatggctcagccgacgaaacgcgatgagattctgcagatcttgacacgggaaacggccctggattgtaccaagacccgcgtcttaggcatgacagccttgaacttggtggaaatcacccgtaagaaagcccgccagagcctctatcaggtccagttcagctcctgcgatgtctgcggcggttcgggcgtcctctattcgccggaaaccgtggccatccagattatccgccgcctgcgctacctggccgggagccatcatctgcagggcgacgtcctcatcgaggcgcatcccgatgtcctggctctgctcaaggataagaagcgcaaagccgaatgggaacgggaactgaagcggaccctttattttgaagaatcgcaccacccgaatcgggaagtcttttccatcttgtcctatcagccctga

SEQ ID NO: 2291 - DNA, 666 bp, Megasphaera elsdenii
atgaaagccgtatttgtcgatttcgagatgaaccctatcggccgggaccagaaggaagcgcgccgcatctgcaagggtgaaatcatcgaaatcggtgctgtcaagatagacgaagacgggaaggaaatctcgtcgtataaagaatatgtgctgcccgaatatacgacagccatgaaccagacctgtcaggaattgacgggaatcactatggaaatgctggccgggaagccccatttccgccaggccttcgaccatttcctgacttggtgcaacgaaggctgccccaatgcctacgaaatgttcgcctggagcgaaaacgactggcgccaactggactgcgaactccgcctcaaggaaatcgacgaacacgacgaccgcgtccgctggatgctcgaccactggcagaatttccagcagatttactgcaatctcctgggcctggacaaagtcatttccctggacaaggccgtcagtaccctgggcgaaaccttcgacggccagatgcacgacgccctctgggacgcccgcaacacatccaagctctatgtcttatcaaagaagaaagaagagtttcgcgacatcatgcagcctatcatcgacgccaccaagccggcagaaccgctgaccttctccctggccgacgccttccgcgctgcccgcaagtaa

SEQ ID NO: 2292 - DNA, 750 bp, Megasphaera elsdenii
atggctatgctggaattaaaacacatctgccagtcatataagaaaggaaagcctgtcctgcgtgatatatcttttacgattccggccggacagttcgtatcggtcatcggtcccagcggtgccggtaagacaacgctgcttcgcctgttcaatcatatggtatgtcctgattcaggagaagtctggattgacgaagttcgattcgatacgctgaaaagccggaagcgacggactattcagcagcgggtcggcatgattttccaagatttctgtctggtcgatacgtgtacgtgtttgcagaatgtgctcaatggctgcttggcccggattccgctctggcgggccctgtcaggtttcttccctcgggtggaaaaagaaaaagcgctggcggcattggacgctgtgggaatggaagaatacagccagacgctggctcatgccctgagtggaggacagaaacagcgtgtagctattgcccggatgctgatgcaggatgctacgattctcctggccgatgaaccggtcgcctcgctggacccgctaacagcccggcaggtattagagctcatgtgcaggctgcaaaaagaacagggtcttaccgtcgtcatgaacagccataatgtggaacaggcacggacctggtcggaccggattatcgggttgaaagatggacggatattttttgacggggccccggcagactggacagaagaccggctgcaggccttgtatgggaggcagacgtcatga

SEQ ID NO: 2293 - DNA, 354 bp, Megasphaera elsdenii
atgccgagaccaccgcggtgccggcgggtttgttcattgccggcggcttctgtctttggacctgtagacggaggacaatcagcagatgccattatcatgggcattgatgagtatgaagtcatccgcctcatcgactgggtcggcttgacgcaggaacagtgcgccgctcagatcaatgtggcgcgcacgacggtaaccggcatttatgattcggcccgacgcaaactggccgatgccctcatccatggcaaacgtctcgtcatcgaaggcggccatatccaagtttgtgaacgttccggtacgtgctgtcatgcctgctgtcacgccggaaaaaaagaatacaaaggagaatga

SEQ ID NO: 2294 - DNA, 1308 bp, Megasphaera elsdenii
atggataaacgagctatgtggaacgaaatgatcagcgtcatcaaacaagatgtgacgccggcgacggggtgtacggaaccgattgccctggcctatgccgcggcgacggcagcccgggaactgggcgaaccggtgcgcttcgtcgacggctgggtctcggccaacctgatgaagaacggcatgggcgtcaccgtgccggggacagggatgccaggcctttacattgccgcagctgtcggcgctctcggcggcgatgccgatgcgggcttgcaggtcctcaaggccttgacgccagacgtcgtcgacctgggcaaacagtacgtcgctgacggcaagattaccgtgtctgtccgggaagatacaccgcatgtcctctatgccgaagctgtcgtctatggcgaaaaccaccgtgtccgcgtcgtcatcaccgatgaccatacgaacatcgtctttatcgaaaaagacggcaaagtcctccgggaccagcgcgtcgaaggcggcagcggcgacgacccgaaaatcgccttcctccatacgctgaccttggcagatatcgtcgattttgccgaacaagtgccgctcgaagaccttgctttcctgaaggaagcggaacggctcaacgaccacttatctcatgaaggcctgacgggaaaatacggcttgaagatcggctataccctgaagcagttagtcgaaaagggcgtcttagcagacgatttgtcccatcgcatccagatccgtaccgtcgccgcgtccgatgcccgcatgggcggtgccgcctttccagccatgaccaattccgggtcaggcaatcagggtatcgccgcgacggagccggtgacagtcgtcgccgatttcctaggcgtcacgccggaaaaacggctgcgggccctggccttatctagtatggtcgccatctacgcccacggttatctgccgaaactgtcagccttctgtgccaccgtcacggcttccatgggagccgctgcggggatggcctggctgctggccgataacgaaccgctagccgtcatcgaacgggccctggccaccatgtccggttccatcgtcggcatggtctgtgacggtgcagccaacagctgttccatgaaggtctcggcctcggtccatgcggcttatgaagcagtcctcctggccctcaatgacgtgcgcgtccaggggacggatggtttggtcgcccattcggccgaagaatgtctgaagaatgtcggcctcctggcctcgcgggggatgcagcagaccgacgaagaagtcctgcgtatcatgctccataaaaataaagcctga

SEQ ID NO: 2295 - DNA, 720 bp, Megasphaera elsdenii
ttgtttccaggaataggtattttagcgaatgtattgggaattgtcggtggcggcctcttggggctggggtgcggacggctgatatcggagcgtttccaaaaggccatcatgatggcctgcgctgtggcggttatattcctcggtttgacgggaacggtcaaagagatgctgcaaatcggcgctgatgggggagtgacgctcgtcgggacgaactgtatgcttgcgagtctcatcggtggtgcagtcatcggtgaagccatcgacctcgaagaccgcatggagcgtttcgggcactggctccagcagaagacgggcagtggcggtgacacgcgattcgtcgaaggcttcgtcacggcatcccttacggtctgcatcggtgccatggccgtcattggttctatcaacgaccgcctgctcagtgacccctctgtcctgttcgccaagacggtaatcgatgccgtcatcgtcatgatcatgacatcggcgctgggcaagggctgcatcttttccgcgatttctgtcggcatcttccagggaatcatcttcctgctggccggctttctcgaacctatcatgacgcctgctgctctaaagagcctcagcgccgtcggcaatatcctgattttctgtgtcggcacgaacctcttcggcctgcctcacgtgcgcattgccaacctgctgccggcactcgtcatcgctgtcgtatgggtgctggtctga

SEQ ID NO: 2296 - DNA, 300 bp, Megasphaera elsdenii
atgatgaacttcaatttattaaatatcggcttcggcaatgtcgtcatgggtgacaaagtcgtggccatcatcagtcctgaatcggcgcccatcaagcgcctcgtccaggacgcccgtgatgggaataccctcatcgatgcgacctttggccgcaagacccggtcggtcctggtcatggataacggctggatcatcttatcggccttgcagccggaaacgatttcccatcgcatcgtccctgccggcagcgatgccgtcctggaagaggatacggaagcaggggaagaagaaaaggagtag

SEQ ID NO: 2297 - DNA, 486 bp, Megasphaera elsdenii
atgcatatcgtaatggtagagccggaaatccccggcaatacgggcaatgtcgcccgcttatgcgcagccaatcatattacgctgcatttggtcaagcccctgggcttttccatcgatgacaagcatttgaaacgggccggcctcgattactggtcgctcgtcgatgtccagatccatgaaaattttcaggaagtcctggacaaatacaaagaccaccgttttttctatttgacgaccaaatcggaacagtgttacgccgatatccagttccaatacgatgatatgctcgtattcggcaaggagacgaaaggccttccggaagacctcctgaaagccaatccggaacgctgcttccgcgtaccgatggtcgaacaggcgcgcagcctgaacctgtccaataccgtcgctatcgtgtcttacgaagcgatgcgccaactcggcttcccgggtatggccaagagcggtatcggtatcaagaatctttaa

SEQ ID NO: 2298 - DNA, 924 bp, Megasphaera elsdenii
atggattttgaaagaagagaatatgaatatgtccgtaaaattgccgaaacagggagtttcctggcggcagcagacaaattatatatcacccagccgtcgttgagccagttcatccgccgtatcgagcgccatatcggagccgaactctttgaccgttcccatcagcccgtgaccttgacggaagccgggcggatttatctggacatcgaaggacagatacaggaattgtgtaaagtacgggaacaacggatccaggatttggggcagaccattggcgggaccgtgcgcattggcagttccaattatcggagttcgacgatactggccaaggcaatccctgtcatcaatgaacgctatccgcatatcgatatctgcctggaagaagggacgacgcgggaactggaagatttcgcccttcaagggaagacggatttttccatcgtcgtcaggacggccggccattcggatttggaatatgttgagcttttccaggaagaactgctcctggccatctcaccggcctgggacctggaacgggaaccgctgtatgataagaagcgccactcccgctacccggtctttgattatcatagccttgacggccatcctttcctggtcatgaaagaagggcaggaactgcgccattcctttttttcccttgtcgaaaccctggatatatcgccgaccgtggctctggaaacgacggacatggccacggcgcagaccctggccggcatcggcgtcggcgcggctatcgtaccgggcggcctggctgtagccaatacgccggccgtggaaccgaagtatttttccctgcgggcctatctggacgattgggacgtcgtcctggcctataagcggggacgctatttgtccaaggcggacaaagccgtcatcagcgtcatctgcaatgtcgctgggtga

SEQ ID NO: 2299 - DNA, 558 bp, Megasphaera elsdenii
gtgtctcaacgcaatcaaaaaattaaattgaagaagcggtcccgccaatcggcccggattcaccgcggttttgccatgcctgtcggtccggggagcgaaaacagcctggtcagtttccgtgactttgccgatctgaaggccaagtatttccgctttaccggccgtattcagcgccggccttttattttccggacattgattttaatgttcgcccagttcatgttctctatcatcctctacagcaagatcgtcgaatctattttgatcaatcatatggaatatgccatcattttcgcgattatcttcgtcctgctgtccattccggctgtctggtcccagatttccctgggcgtccgccgctgtcacgacatcaacaagccgggcctcatgttcgccgttccttttatttgttacctggccagctatgtcctgcctgtcctgggacaggatacagccgctatggcagctcagtcgatcatggctgtgtcttatctgggcttgtttaccgtcaaggggacgtccggcgacaatgcctatggcccggaacgggcgcgatag

SEQ ID NO: 2300 - DNA, 900 bp, Megasphaera elsdenii
atgggagatgaaccttttatgttaacttttccaaatgtgattgttgccatggtcacgccgttccacgaagacggttccgtcaattatgaagcggctgttgaactggctaagaaatatgctgatgaaggctcggccatcctcgtcggggctacgacgggcgaaggggctgtcatgacggaagaagaaaagctcaagctcttccaagtcacggcagatgccttgaaagacaagaccctggtcatgggcaatgtcggcaccaacaatacgctccagactatcgaaatggccaagaaggccaaagatacgggcgtcgatgtcctgctgtgcatcgtcccgtattacaataaaccgaaccaggaaggctgttacgctcactttgctgccatcgccaagtcgacggacctacctatcttcatttataacgtaccgggccgtacaggcggcaaaatcgaaccgcagacggtctgccagctggctcatgacttcccgaacatcatcggcctcaaagacgccagcggcgacctcgattatgccggctacgtcgcagccaatgcaccggaaggtttccacctctacagcggtgacgacaacctgaccctgcccatcgtcgctgtcggcggcgaaggcgtcatttccgtagctgcccacgtcatcggcaaggaaatgaacgaaatgatccaggcccataaagacggcgacgtcaagaaagccgctgccctccatcagaaatacctgcccttcatgaaaggctgtttctgcacggtcagcccggtcccggtcaagaccatgctcaacctgctcggcttcccggctggacccttccgcctgcccttggtagacgctacgccggaaatcaaggccaaatgtgaacaatacctgaaagatatcggtcggctataa

SEQ ID NO: 2301 - DNA, 3525 bp, Oscillibacter sp.
atgtccgataagaaagtcatgaaaactatggacggtaacgaggcctgtgccaccgttgcctaccatttcaccgatgtagccggtatctaccccatcaccccctcctctcccatgagcgagaaggtggatgagtggtctgccgccggtaagaagaatatgttcggccagcctgtgcggctggtggagatgcagtccgaggcgggcgctgccggcgccctccacggcgtggcggaggccggtgcgctggccaccaccttcacctcctctcagggtctgctgctgatgatccccaacctgtacatcatggccggtcaccggatgcccgccgtgttccacgtggctgcccgttccgtggcccagcacgccaacaacatcttcggtgaccatcaggatgtcatgagctgccgtaccaccggcgtcaccatgatgtccaccggcagcgtgcaggaggtcatggatctggccgccgtggcccacctgaccaccatcaagacccgtgtacccttcatccacttccacgacggcttccgcaccagccacgagatccagaagatcgaggtcatcgatctggacaaggtggagaagctgctggaccgtcaggcgctggaggactatcatgccatcgccatgaacccggagcatccggtgatgcgtaccaccgtgcagggccccgacgtctactaccagtctcaggaggccaacaacggtgcctatgacagcatccccgctgtggtggaggggtatatgcagggcatcaacgagatcaccggtcgggactaccacattttcaattactacggcgccaaggatgccgaccgtgtcatggtgatgatgggctccgcctgcgagtgcgcccgtgaggtggtggactatctgtgtgccaagggcgagaaggtgggtctgatgcagatccatctgttccgcccctttgacatggagtacttcctgaacgccctgcccagaacggtgaagaagatcaccgccatggaccgctccaaggaacccggcgccattgccggcgctgtgtatctggatgtgtgcgccgcctttgccaaccgcagcgacgccccggagatctacggcggccgctatggtctggcctccaaggacgtgacacccgcccagctgaaggccgtgttcgacaacatgaaggatgaaagcggcaagcatctgttcaccatcggcgtcaacgacgatgtgactcatctgtctctggatgtccatgagcctctcatcaccgagtccgccgacaccgtgtcctgcaagttctggggtctgggctccgacggtacggtgggtgccaacaagaactccgccaagatcatcggtgactacgccggtatgtatacgcaggcctacttcgagtacgactccaagaagtcctacggcatcaccaagagccacctgcggttcagtaagagtcccatccgctccacctacctcatcaaggcggcggattttctggcctgtcactcccagtcctacatcacccgctatgacatgatccacgagatcaaggacggcggcaccttcctgctgaacacctcctggaccgaggaggagctgacggagaagctgcccggcgacgtcaagcagtacatcgcccgccacaacgtgcagttctatatcgtggacgccaaccgtctggcccgtgagttgggcttgggcaaccacgccaacatgatcctgcaggccgccttcttcaagctctccggtgtgatgccggtggaggacgccgtgcgccacatgaaggaggctgtgcaaaagacctacgccaagaagggcgaaaaggtggtcaacatgaacatggccgccgtggatgccggtatcaacagccctgtgaaggtcaacgttcccgctgactgggcgaatgccgccgacgaccgcaccgtggacgagagcctgccggatgtggtgaagaacatcgtggtcccctgcaaccgtcagcgtggcgacgatttgcccgtgtccgccttcctgccctatcaggacggcacctatccgctgggtacctccaagtacgacaagcgtggcattgccgccttcctgccccagtgggacagcaacaagtgcctgcagtgcaaccagtgtacctttgtctgcccccatgccgctatccgggcctatctggtggacgaggaggaggccgctgcggctcccgccgccttcaccaccgttcccgccaagggagccaagggcttgcagtaccgtctgcaggtcagcacgctggattgcaccggctgcggcagctgcgccgcttcctgtctcgccaaggataaggccttgacgatgcagcctgtggatgatattatgtatgatgaaaccaattggaactatgccctgtccctgaaggacaagcccggtgtgttcgaccgcaagaccctcaagggcagccagttcagccagccgctggtggagttctccggcgcctgcgccggctgcggcgagaccccctatgccaagctcatcacccagctgtacggcgaaaagacctactgggtcaacggcgtgggctgctctctggcttgggccggtgcattcccgtccctgccctataccaagaacaaggagggccgtggccctgccttctacggtaccctgttcgaggatcaggccgagaacggtctgggcgtggtgctggctaccaagcagcgccgggcctacgtcaagcaggcggctcagcagctgctgccgctggtccccggcacggagctggagacggccatcaacgcttggctgtcctccttcgacgatctggatgccaacgatgccgatgcccgcaagctgacggcggctctggagtctgcctccctcaccggtgaggctgccaagctggccgagaagctgctgaagaacaaggatcagctgggcaagaaggtggtatggcttttcggcggcgacggctgggcctacgacatcggctatggcggactggatcacgtcatggcctccggcgaggacatcaacgtctttgtggtggataccgaggtgtactccaacaccggcggccagtcctccaaggcaacgcctgtgggcgcttccgccaagtttgctgacggcggcaaaaagactgccaagaaggatctgggccgtctgatgatgacctatcccaacgtgtatgtggcctccgtggccatgggcgccaatcccgctcagctgatgaaggccgtcaccgaggctgtggcccacaagggtccctccatcgtcatcgcctacgccccctgcatcaaccacggcatcaaggctggcatgaacaacgtgcaggccgagatgaagaaggctgtggactgcggcctgtggcccctgtaccgctacgatcccaacaagaccgaaaagcccttctctctggactataagaagccctctgtgcctgtggaggagttcttcaacggcgaggtccgctatgccggcctgaagatcaagtatccggagacggcggccaagctctttgccgaggctcaggtggaggcagatgcccgctatgagacctatgtggcgctggcgcacagctacaacaaggactaa

SEQ ID NO: 2302 - DNA, 3678 bp, Oscillibacter sp.
atggccaaggacaagtactatggcaagaccctgcgaaagaattttgccagacacgaggaagtcatggcgatgcccgacctgctggagatccagaagaaatcctacaagtggtttctggacaccggcctgcgggaggtgtttgcggacgtagcctccatcacggactatgccggtaatctggagctgagctttatcgattacagcatggacgagaagcccaagtatgacgtggaggagtgcaaggcccgtgacgccacatatgccgcacccatgaaggtcagcgtgcggctgcggaacaaggagacgggcgaaattaaggagcaggagatcttcatgggtgatttccccctgatgacccactccggcacctttgtcatcaacggcgccgagcgtgtggtggtcagtcagatcgtccgctcccccggcatctactacggcaaggagatcgacctcaagaccgatctgcccctgctgacctccaccgtcatcccctaccgtggcgcatggctggagtacgagaccgacaccagcgaggtgttctgggtccgcatcgataagaaccggaagctgcccatcacctgcctgacccgtgcgctgggcctcaagacggacagcgagatcatggaccgcttcggcgacgatccccgcatcgtggtgaccatggagaaggacgcctgcaagacgtatgaggacgccatgctggagatctaccgcaagctgcgccccggcgagccccccacgctggactccgccgagaccctgatgcagaacctgttcttcgatccccggcggtacgatctgagcatcgtgggccggtataagttcaataagaagctgaccctgtggacgctggccaagggccagcagctggctatgcctgtggccgaccccgccaccggagagatcctcttcgacgagggccacgtcctcaccggcgcagagtgccgggagctggacgccatcggcgtggcggaggtctccgtgaaactggacagcggcgatgtgatccgggtgttcaccaaccggatgtgcgacatgagccgctacgtggatttcgatcccaaggagtgctgcggcatcaaggagcgggtgcgcttcgacgtgctgcaggagctgctgggccagtacagcggcgaggagttgatggagcagtgcaggctccacgccgacgatctggtgcccaagcacatcatcgtggacgacattctggcctccatcaactatatgaacgctctggcccacggactggtcaacaaggatgatatcgaccatctgggcaaccgccgcctgcgctgcgtgggcgagctgctgcaaaaccagttccgcatcggttttagccgcatggagcgtgtcatccgggagcgcatgaccattcaggatctggatatcgtcacgccccagagcctcatcaacatccggcccgttacggcggccatcaaggagttcttcggctccagccccctgagccagttcatggatcagaccaacccgctggcggagctgacccacaagcggcgtctgtccgctctgggacccggcggtctgtcccgtgagcgtgccaacatggaggtccgtgacgtgcattacagccactatggccgtatgtgccccatcgagacgcctgaaggccccaacatcggcctgatctcctatctggctacctatgcacgggtcaacgagtacggcttcatcgaggcccccttccggcgggtggagcatccctccggccgtgtcaccgacgagatcacctatatgaccgccgacgtggaggatcagtacatcgtctgccaggccgccgagccggtggacgagaacggctgcctcatcgggccccgtatcacctgccgccatcaggatgagaccattcaggtggagccggagtacgtggactatatggacatctccccccgtatgatggtgtccatcgctacggccatgatccccttcctgcccaacgacgacgccaaccgtgcgctgatgggcgccaatatgcagcggcaggccgtgcctctgctgcggccggaggcccccatcgtgggcaccggtatggagcataagatctgcctggactccgccgtggcggtgctggccgagggcgacggtatcgtcaccaaggtggacgccaccaacgtgtccgtcaagtatgacgccggcgagaccaaggactataagctcatcaagttcctgcgctccaaccacggcacctgcatcaaccagaagcccatcgtttccgtgggcgagcgggtccacggcggcgacgatcccacggtgctggccgacggccctgccacgcaggagggcgagatcgctctgggccgcaatatcctggtgggcttcatgacgtgggaaggctacaactacgaggacgccgtgctgctcaacgagcggctggtgaaggaggacgtgtatacctccatccatatcgaggaatatgagatcgacgcccgtgacaccaagctggggcctgaggagatcacccgtgacatccccaacgtaggcgaggatgctctgaaggatctggacgagcggggcatcatccgggtgggtgccgaggtccacgccggggacattctggtgggcaaggtcacccccaagggcgagaccgacctcaccgccgaggagcgcctgctgcgggccatcttcggtgagaaggcccgtgaggtccgtgatacatccctgaaggtgcctcacggcgagagcggcatcatcgtagatgccaaggtatttacccgtgaaaacggcgacgagctggggccgggcgtgaatcaggtggtccgtgtctacatcgctcagcgccgcaagatccaggtgggcgacaagatggccggccgtcacggcaacaagggcgtcgtgtcccgtgtgctgcctcaggaggatatgcccttcctgcccgacggcacgccgctggatatcgtgctgaaccccctgggcgttccctcccgtatgaacatcggtcaggtgctggaggtccatctgggctacgccgccaagactctgggctggaaggtggctacccccattttcgacggcgccaccgataaggatatttccgaggccctgcagctggcgggtctggatccggagggcaagagctggctgtacgacggccgcaccggcgagcgctttgacaacaaggtcacggtgggctatgtgtacttcctgaagctgcaccatctggtggatgataagatccacgcccgttccaccggcccctactctctggtgacccagcagcccctgggcggcaaggcccagttcggcggccagcgcttcggcgagatggaggtgtgggcgctggaggcctacggcgccagctacaccctgcaggagatcctcaccgtcaagtccgacgatgtgacgggccgtgtccgcacctacgaggccatcgtcaagggccacaacgtgccgacccccggcgtgccggagtccttcaaggtgttggtgaaggagctgcagtccctgtgcctggatattcaggtgctggacgaggacggcaaccagatcgagctgaaggaggacgaggacgctctggataccttcaatctggcccggatggatgccgacgacgagcgccagaaccgctatgccgacgacaacgagctggcggatgcgggctttgactacgtggccgacgaggaagtggacgcctcctacgacggcgacggggaagaattttaa

SEQ ID NO: 2303 - DNA, 3900 bp, Oscillibacter sp.
atggtcaaattcagcgtgaaaaagcccctgactgtctttgtggcggtgctggcggtgttggtgctgggcgtggtggcgtatctgaaaatgacaccggacctgctgcccaacatggatttcccctatgtggttatcgtcaccagcgaccccggtgccagcccggaggcggtggagtccgccgtcacccgccccatggagcagtccatgtccacgctggatcgaatcaagtccgtgacctccacctcgcaggacagcgtctccatggtggtgctggagtttgaggacggcgtgaacatggacaccgtcagcgtggacatccagcagaagatcaacatcctgcaaggctcttgggacgacggcgtcggcaccccctatgtgctgaagatcaacccctccatgctgccggtgcaggtggcggcggtgtcgtacagcggcaaggatgtgacggagctgtcggattttgtggaaaacaccctcacgcagaagctggagggcatctccggcgtagccagcgtcgccgtcagcggcacggtgcagcggcaggcccatatcatcctcagtcaggagaagctggatgccctcaccgccacgctgcgggaggctatcggcaagacactggacgagacggccagccagctggaggggacccgcagccagctggagagcgccaagggggccatccgctcgacggaggagtccgccgtccgggaggccgccatgcaggctctgaccgccgtgcagcagtctctgaccaccctccgcagcagcgagagccggttggaggcgaacctgaaggagctggcggagattcaggcgctgaaggtgcagctggatgctaaaaacgccgtctatcaggcccggatggaggccatccggcaggacgattccctgacggaggaggagaaggcggagcagctggccgccatcgaaaacgacccggagtacatccagctgcaggcggaccttgcggagctggagctgcgaatcgccgcactgaacacctcgtgggagcaggcggcggaggacgccaaacggtggcaggagatgctggagcagctaaaagagcagatccgccagctggagaatgactccgtggtggcctccattgccgatgaggtaacagcgggagtcatcaccatggccgatggcgtcacccagctgctctctgccaatgtgcagctggacagcgccctgacccagctggagcagggtctccggacgctggagtcctcccgtgcctcggcgctggagcaggcggacctctccggggctctgaacatccagaccatcaccgccctgctgacggctcagaacttctccatgcctgccgggtatctgcaggaggacggcgtgaactacatggtttccgtgggcgacagcatctcctcccgtcaggagatgtcggacatggtactctttgatctgggcttggagggcgtggagccggtgaagctctccgacgtggcggagatcgtggtgacggataactccgatgagatctacgccaagctcaacggcgacaacggcgtcatcgtctccttcaacaagcagtccgcctacgccacggcggaggtgtccgacaacattcaggcccgctgcgacacgctggagaaagagcacgacggcctgcacttcgtgccgctgatggatcagggggactacatctatatcatcattaactccatcctgtcctccttgggctggggcgctctgtttgcggtgctgattctgtacctgttcctgaaggacctgcggcccaccctcatcaccctctgctccatccccgtcagtgtgatcttcgccgtggtgctgatgtacttctccggcgtcaccatcaatatgatctccctgtcgggtctggcggtggcagtgggtatgctggtggataactccgtggtggtcatcgagaatatctaccggctgcgctccaagggagccaccgtcattcaggcggcggtgtccggtgcggcgcaggtggtgggggccatcaccgcctccacgctgaccacggtgtgcgtgttcctgcccattgtgttcgtggagggcatcaccaagcagctgttcaccgatctggccttgaccatgacgtattctctcctggccagcctcatcgtggccctgacactggtgccggccatggcctccgggatgctgaaaaaggaaaaggccgtgaaggccggcctgctggagcgggtctatcccgcctaccgcagggcggtgggctggtcgctgggccataaggccgtggtactgctgctggcggtggtgctgctggctggctctgcgtggggtgccgtcagccggggcttcgtgttcatgccccagatcgatatgaataacgtcagcctcaccgtcaccatgccggagggcatcagccgggaggaggcggtggcactggcggacgaggtggtgcgccgggccggtacggtggaaaatgtggatgccgtgggtgccatgatgtcctccggcagcggcatggatatgagcagcatgatgggcggctccggcggtgcctatgatgtcaccgcatacgtcaccatgccggagggggcctccggcgccaaggcaggcaaggccatcgaggagctgtgcgccgacctgccctgtcaggtgacggcctccggctccatggacagtatgtctacctatctggcgggcagcggagtctctctgaaggtctacggcgatgacatggaggatctccagtcctccgccaaggcgctggcggcgaccctgaaaaccgtggagggtaccggcgaggtgtccgacggtctggaggaggccaccacggccctccacatctccgtggaccgcaacgccgccatggaaaagggcgtcaccgtggcgcaggtgtatatggcggtggcctctgccctgaccaacacctccgcctcctccggcctgacgctggatgggctggagatggaggtttccgtccagtccccggaggagagccgcatgacccgtgaaaagctcatggatctggagatcaccccgtccagtggtacgaatctggacagtatgagtaacataagtggtatgagcggcagcacctcctccatgggcggaatgtctgcgctggcgggcggcagcacgtcctccggcggcagcgccctgacggacgctgccggtcaggaagtgtccggcttccgtctgggcgacgtggccaccattgaggagaccgtcagccttggcagcatccagcgggagcagcagcgccgctgcgttaccgtcacggcggaggtagccgagggctacaacgtcaccaaggtcacagccgccgctcagacggcggtggccggggtagacctgccgcagggcatcaccgcccagttcagcggcgagaacgaggccatcatggatgccatgggccagctgctgctgatgctggggctgggcgtgctgctggtgtatctggtgatggtggcgcagttccagtcgctgcgctccccgctgatcgtcatgttcaccatcccgctggccttcaccggcggctttctggccctgctgatctccggcatcgagctgagcgtggtgtccctcatcggctttgtgatgctggtgggcgtcatcgtcaacaacggcatcgtgctggtggactacatcaaccagctgcgcctgtcggggatggagcggcgggaggccattgtggaggccggtgtcacccgtctgcggcccattctcatgacgtccctgaccaccattctgggccttgtggtcatggccttcggcggcgatgccggtacggctctgatgcagccggtggcgctggtgtgcatcggcggtctgctgtacgccaccctcatgacgctgctggtggtgccgtgtatgtatgacctcctcagccgccgggagctgcggaaggtggaggagacggacctgcagacgctggatatctga

SEQ ID NO: 2304 - DNA, 2871 bp, Oscillibacter sp.
ttgtggtatgatacaggatgtattcttgtttctattcgccgcagcgatgccggaaggctctcccgcccggcggaagagaaacgggagcaatacgcatactttccttttggaaacagaaaggacacgatacatatgggactcattacgaaaattttcggaacgtacagtcagcgggagctgaaaagcatctaccccatcgctgacaagatcgaggcgctggccgacgagtacaaggccctcaccgatgcccagcttcaggccaagaccccggaattcaaggagcgtctggccaacggcgagacgctggatgacctgctgccggaggcctttgccaccgtgcgggaggcggcggaccgtgtgctgggtctgcgcccctatcgggtgcagctcatcggcggcatcgtgctgcatcagggccgcatcgctgagatgaagaccggtgaaggtaagacgctggtggccacgctgccctcctacctcaatgcactgacgggccgtggcgttcacatcgtcaccgtcaacgactatctggccaagcgagacagcgagtggatgggcaaggtccaccgctttctggggctgtcggtgggcctgatcgtccacgacctcagcaaggaggagcggcaggccgcctacaacgccgacatcacctacggcaccaacaacgagatgggctttgactacctgcgggacaacatggccatctataagaacgagcaggtgcagcggggccataacttcgccatcgtggacgaggtggactccatcctcatcgatgaggcccggacgcccctcatcatctccggcatgggggacaagtccacgcagctgtatgacatggcggagtcgctggtggcccggatgaagaaatacgtggtggcggaggtagactccaaagaggaggaagccgaggatatcgacgccgactatgtggtggatgagaaggccaagacggccaccctcaccgcccgtggtatcgccaaggccgaggagtttttcaatctggagaacctctccgacccggagaacagcaccatcgcccaccacatcaatcaggccatcaaggcccacggcgtcatgaagcgggacgtggactacgtcatcaaggacggcgagatcatcatcgtggacgagttcaccggccgtctgatgttcggccgtcggtactccgagggtctgcatcaggccatcgaggccaaggagcacgtctccgtgcagcgggagagcaagacgctggccaccatcaccttccagaactacttccgcctgtatcagaagctgtccggtatgaccggtacggccctgacagaggaggaagaatttgccaccatctacaagctggacattgtggagatccccaccaaccgtcccatcgcccgtatcgacgatcaggactccgtgtataagacggagcagggtaagttccgggcggtcatccgtcaggtggaggagtgccacgccaagggccagccggtgctggtgggtacggtatccatcgagaagaacgagcttttaagccggatgctcaccaaggcaggcatcaagcacaacgtattgaacgccaagaaccacgagcgtgaggcggagatcgtggcgcaggccggtaagctgggcgccgtcaccgtggccaccaacatggccggccgtggtacggatatcatgctgggcggcaacgccgagtacatggccaccagcgacctgcggaaggcggggctgtcggacgagctcattgctgaggccaccggctacgccgagacggacaaccaggagattctggatgcccgccgcctgtttgcccagaagctgcagcagcacaaggaggagatcgccggagaggcggagcaggtgcgtcaggccggcggcctgttcatcgtgggtaccgagcgccacgactcccgccggatcgacaaccagctgcgtggccgtgccggtcgtcagggcgaccccggcgagacccggttctatatctcgctggaggacgacctcatgcgtctgttcggcggcgagcgcatcaacagcatcatggagcggatgaacctcgacgaggacacccccatcgagaacaagatgctgacccgtgccattgagcaggctcagaccacggtggagtcccggaacttccagtcccgtaagtcggtgctggagtacgacgacgtgatgaacaagcagcgtgagatcatctacgaccagcgcaagcaggtgctggagggcatggacgtcaagggcatcatcatgaacatgatgtccaccgccatcggccatcaggtcagcagcgctttcggcggcgagagccacatggacgaggccgggatgcgggagctgctgcgtcaggtggagggcctgtacttccccaggtacaccgtgcgcttcgagccggagcgcatccctcagctgacggcggaggaggtcatcgacgcctttaccgccgccgctgccgacttctacgaaaagaaggagcaggagttcacctcccctgtcatgcgtgaggtggagcgtgtggtgctgctgcgggtggtagacgagtactggatggaccacatcgatgccatgaccgatctgcggcagggcatcggtctgcgggcctatgctcagacggatcccatcatcgcctataagaaggaatctctggagatgttcgaggagatgatctccgccattcaggaggaaaccgtccggcggctgtactccgtacggctgcggaagaacgaagaggtcaagcgggagcgtgtagccaagaccacgtcggagagcgtgggcggcgacggcaccgtgaagaagcagccccgcaaggtgaagaagattggccgcaacgaaccctgcccctgcggcagcggtaagaagtacaagaactgctgcggccgggatgcgtaa

SEQ ID NO: 2305 - DNA, 6927 bp, Oscillibacter sp.
atgactgagagaaaactacaacggaatagacggggcttcacgctgacggaggtgctgctggcgctggccatcctcatcatcctgctggcgctggccatgatccccatcagccgccaccagcgcaatatccgccagacggagctggattccaaggcggagaccatctatctggcggcccagaaccgcctctctcagctgcaggccagcggccgcagcgacgagtacggaaaggaccgggccacggccctgaacaacatcccctgggacgccgagcaggataagtacaccaccagtactctgtactacgtcacctccgccgccaaaagcaccgacacctccgccgccgggagcatcctgccccgtgagcaggtggaggcggagctgtgggacgccaactgggtcatcgagtatgaccccggcagcggcagcgtttacgccgtgttttacagcgaaaagcccatgcagtacagcttcgacgccttcaaccccctgcgctcacgggatcgccgggtgcaggagggggccaccgtgggctactacggcggcgacagcgtccagagcgaggacaccggcaagctgacccccaagatggagatcatcaacaaggagcgtctgctgctgaaggtcacctgtgacacgccccgtgaccccctgcacttctatgtgacggtgacggacgcacagggccactccaccgggcggatggagctcaccggctccgaagtcaacgtctcctaccgcacctataccgtcaccatggtgctggacgacctgacggagggcaaacgcttctcccagcagcgccgcttccggcagctgacccccggctccgacctgaccctgaaggtggaggtggagagcgacagccgtctggtggactccgtcaccggcaagctcaccaccaacagtctctttgccgaggtgcgggacggcggcaccactgccgtggtcacctatgcccggcatctgcaaaatctggacgagggctccggtctgcccaccgccatcacacgggcgctgcaggagcaggatatccagttcgtcaacaccggcatggacgacggctgggacagctgctatccgggccggaggttcacccccatctataacgagaacctcgcctattacgacagcaccgtcgccgtaggcacccagtcctatcaccctgtggtctatgagctgccggtggataccgacggtgacggcggcctgttcgagagcttccggggcaccttgcgaaacatccgtctgtgcggtgcccagatcagcgccggcggcaatgccggcggtctggctggctccctccggggcggcaccaccattgagggctgtcaggtctacctgagccccacccgtgacaagctcagcagcaaaagtgagcaggatatctggatcagcggcgccaccgccggtggtctggtgggccgctgtggttatgacctcaccgtccgcaacagcttcgcctcctccgtgctggagggcggacgctacgccggcggtctggtgggctatatcagcggcactcgcaccgtctatgtggagcactcctacgccgactgctacctctacgcctccggcaccaccggcggcctcatcggcagctgtaccggcacggcggatatcaccctgcgggactgctacaccgccggttttcaggaagcggacgtcatggcgggtctggtgggcggtgagttgtcctacggcgacgtcgtcgacacctgttacagcgccagcgcccggctgaacggcagtgaaaagctcacctactccaccgccaagcctgcggatgtcaccaccggcaagcccgatatcaccagcacctactatatgtcccacggcgaccacgacatggacggcacggtctttgccgactatgagcagtggagcggccgcagccgggccgacgccatcgagaagtacctcaacgacgccttcaccgctgagaccggtggcagcgacaccgtggcctataacctggtggacggcatgggtctgggcgcttactcctatccccgcctgacggggctgacccactacggcgactggcaggctcagttcgaggccggtacactggtgtactacgaggtctattccgacggcagctacggcttccgtggtgccaacaaatccaccgtcaaaaccaccggcacggtggtgggcgacggatacggcatggtgtacagcacgctgccggagcaggatctgacggtgcgctattcgctgggggggcgggaggtcacctctaccttgtaccgtgccaacgccatcgacatgggcgggggctactacctgctgcccctgccccggacactggtgaacaccaccgaggtagccacggacttctaccgccgggtgcaggtggaggacaccacctactacttcaatccccatttcacctgctgggtatcggagggctccgaggccccggaggcccccagcgagatcggcatccgcacagcccggcagctgaataacctgagcctgtactatgagcagtacagccccctgctggccaaggacaccaccttccagcaggagcgcagcatcgactactccggctacgactgggcgaactacggccgcagcggcgccgccgtcaccagccagcagcccatcggcagcagtgccgtcgtcccctttacccacatctatgacggcggcacctatcccatcgccgctgtgccgctccagagtcccaacggcggcgactacgccggactcttcggcctgaatcagggtagtctgcggaatgtggtgctcaccaccggggagcaggactactccgtgacgcttcggggcatcctgcgcctgcgtaccgcctatgtcggcgctctggcaggccgcaatgacggcaccgtctacaactgcgctgcggcgggctactccgtcacagcccacgcctatcagggcagcgtcctgtatatgggcggcttcgtgggctataacgtcgggaccatccgctccggcagcgtcagtactccctccctcaccgccagcagcaactatgcccgtctgctgatgggcggcttcaccggcggcaacagcggtctggtgagccagagctacgccatggccaacgtggaggtactccagatccgtggcggcggcgtggcactcagcggcttcgccggggagaacatcggctcgatccgcagcagctactgcgccacggcccttacctcccccggtgccgatacctacggctttgccccggccaccggcagcacctccggctgctgctatctcagcggcggtacctatcgcttcgtgggacaggtccatctgtatgattacagcgaccagtccggcgcacgggccgtcaatgagcagggactgaaggccctgaccctcaccggcttctcttccgccgatgccagccacacctatcaccacagcaaaaccctgaacaccgacgggcaggcctatccctatcccgccagtctcaccggccacggcagccccgtccactacggcgactgggtgacccccgccgatctgggtacgctgggcatggtgtactgggagcacgaggagggcggcagtaaccccggctatcacttctcatacatcggctttgaaaacggcgtccgcaaggacggcagcagcctctgcaccgcccacgacgacggcggcaagatcaccgcctacggctacggctactactggtccaagggcgagacggagcccctgctggagacccagcgcatcgctctggacggccgcaacaccgaggcggcggcggagctggagaagcagatgcctccgttcagcttcgtcacctatcagacctccgacaccggtctgcggctcctcagcggcaccaccggcaacggccactggttcctgtctcagggggatgtgtggttcacctacaccgtcagtcccttcttcgcagagtcctatgccgtcaccgccgtcagcaccggtactaccggcggcaccaccggcgtagagcccggcacggatgccctgccctatcaggtgcggtccgtggagcaactgcaatacatcaactggagctactacggcaatcagggcagctccacccgtgacgtgacggacagcgggagtatgtacaagtactacccctatctgcaatatagccgtgtcacctggggctaccagagcaaggaggatgccatcgccggcgactccaccggcggcacccgtcccatccgcacgtggaaacagagccatgacctcaacggccagagcctggcggatcccacggatgcctccctgaattacagcttccatcccatcgccggctctgtctacgacagcggcagcagcaccgactaccgtatggtgctgtacaactggttcggcagcaagtacgacggccagagctactacatcaagaacgtgaacatcgactcctactgctacaacgtgggcctcttcggcaccaccgccggcgcagagatcgcgaacatcgtcctttatagtgacaacggcgccgtcatccagcgcaataccgatcccacgccctccagcggcacccggacggcgcgccagtattccacctcctacgccttgggcggtctggtgggcatcgcctatgactacaacagcagcatgggcagcggcagcatcaccaactgcgccatcgccggctacactgtggccgacaacagccgtaacaaacagcatctgggtgaggccgccatcggcgggctggtgggtgtttccagcgtcaacctcaacaagtgttccgccgtggtggatctgcagatcaactgcacccacgtcgataccaacggctacatgaacgccgcccactacggcaactatgtgcgtgtaggcggtctggccggcggtgtgcgctttgcggtaacggactgctacaccggcggtaccatcaccgttggggaggagaccctgaaggagcgtgtccccgtggacagcagcaacaatgtctttgccgacggcagctctgccgtccaggtcaagatgaattccggcggtgtctccggccccgatacctatgtctatatcggcggtatgggcggcagcggcttctccgccagcttcaccaactttgtcaatcgctccgacagttcggatggtcagcccactttcaataactgctacacctacatggagttcccggacatggagggtaccatcaccggcatctcccttatgggcagtattgccgaccgagccggtgccagcaccaatgcaaagctctatatcaacaactgctactacctcaacagcagcaagaacagcatttctttcgacgatctgcccaaatactacggcaagggtaattccaaaagcaactcccttagcgggctgctgcgtacagaagcggcacgggaaaaaatgctcaacggcgatctcagctacctccgtaattacggctggaacggtggttccaacacgtatagcatcaagggcctgacgggcctgacctatgagcagatgtcccagcgcaccggtgccaacatcgtcacccagaacaacagcagcggcacgacccaacgctacgatagctttgccgccgctctgggcagcagctttgcgtgggtcactaccgaggaaaacggcgccgaggtccacggcaaatacagcttccccggcagcgacgaggccctgcagggtcaggacttccccttccccaccgtgctggtgcaggataacgtctttggccgggcccgtctacactacggctggtggccgtcatctggcctctactggagcaagggcttgctgacgctggacatgatcaccgactacgatgccgccggcggtgaatccgccgtgacgctggatctgcggttcgagggcacggatcccggcacggagctccccaccctgtcctataccaaggacggcatcgtcactgccgagcttcagccggacggcacgggccactacaaggtccgcatcgtgggacaggccatcggctccaccgagatcatcgccacactgggggattacaccgcccgtctggcagtggacgtcaccgccaagctctccatctccgtggatcaactctccgtagagcagtatgtaggcgagagcactaccctcaccctcaccgcacgggacggcaccggccaagtgctcaccggcgtcaaatgggacgtggtcagcggctctgaccgggtggtcacgctgtccccggtgagtcgggatcagcaggtcaccgtcaccggtaagggcgagggcgaggagactctgctggtgcaggccggtgtcaccgtgggccagcgcaccttcaccagtgagctgcgcctcaccgccaccatccatatgcagggcgtgctgggcatcgcccatgtgggcgatggagacgccgtgtatcgtcagggcatcctgaatcgggacgccaccgactgggatacccctctcggccccgccgagggcgatgtccccgattacgagggtctgtacctgtacagccgtggcaaggcggcggacttccggtacttcaccgtaacggcccttaccgttctggatagcaccggcacttcccacgatatgctctccaccgccgatgaggactaccgggtcaccgtaggcgacgtggtggccgcccaacaggacggcgacttcagctatcgccccatcaccatccacggacggcagcaggagacagtcaccctgcaggtgaccctcaccgacacccgcaccggccggccctatacgctggatatcccctataccctgacggcggaggatacgcagatcaccgccaccttcgtggtgggccgcctgcggctggagaaggccgttcccttcggccagcccgccgccggcttcctccccacggaggaggagcttgcctcggcgctccggcccgttgtgggctggacccccagtcccgacctgcccctgttccaggataccacctttgaacccatctatcaggatacggaggagccaggtctgctccgctggcgctggagccgataa

SEQ ID NO: 2306 - DNA, 2433 bp, Oscillibacter sp.
atgaatgaattgcagcagcgttttattcgggcaaggcggcaggccatcgccctgaactatcagcatctcaacgacaagcagcgggaggcggtgctctccacggaggggccgcttcttctgctggccggagccggcagcggcaagaccacggtgcttatcaaccgggtggccaaccttctgcgctatggccggggcagcgacacggaggagatccccatgcccatctccgacgatgaggtggagtttctggagcagtatgtccggcacccggatccggagcagaagcccttggcggattatctgtgtgccgtggagcccgcccgcccgtgggaggtactggccatcaccttcaccaacaaggctgccaatgagctgaaggatcgcctggagcggatgctgggggaggagtcccgtgatgtgtgggccgccacctttcactccgcctgcgtgcggattctgcggagggacatcgacaagctgggctttgaccgcagctttaccatctacgataccgatgacaccaaacggctcctgaaggacattctcaaggaattggagttggatgaaaagacctttcccgtccgggagatccagaccatcatctcccgctccaaggatgatatgatcctgccggaggagtttgccgctcaggcagaaaaaactcaggattggcggcgtaagcgcatcggtaaagtatatgcactttacaatcggaagctacgggacgccaatgcgctggacttcgacgatatcatcctccacacggtggatctgctgcggacggacagggagacgctggcctactaccagcgcaagttccgctacgtcctcatcgacgagtatcaggacaccaaccatttgcagtatctgctggccagtctgctggcagggggacaccgcaacatctgcgtggtaggcgacgacgatcagagcatctaccgcttccgaggggccaacatcgagaacatcctgaattttgaaaagcagtataccggcgcccgtaccatccgtctggagcagaattaccgctctacacagaacattctggacggggccaacgccgtcatccgccacaacaccggccgcaagggcaagactctgtggacggagaacggaaaaggggaaatcatcaccgtcaagacctgcttcaatgagtccgacgaggccaactatgtagtggggcagattatgatgaactaccgtcggggcgtcaactggaaggaacacgccgtgctctaccgaaccaacgcccagtccaacgccatggagtatgcctttaagcgcaacggcgtaccctataagatcatcggcggcatgaagttcttcgaccgggccgaggtcaaggatatgctggcctatctgtgcgttatcaacaaccccaccgatgatctgcggctgcggcgcatcatcaacgtaccctcccgcaagatcggcaccgccacggtggataaggcgcaggtgatcgctgcggaggaggggaggcccctctatgagatcctctgccacgcatccgattatccagaactgaaatcaagcgctgtaaagcttcttacatttacagatatgatggaggaaatgcgccgccatgtggccgatctggggctggtggagttctacgaatatgtgtgtgaccgcaccggctatgtgcggatgctgcaggaaaagaacgatatggagagccggggccggctggagaacgtacaggagttggcctccagcatcatgggctttctggagaacgagccggagaaccccactctggcgggctttttggacgaggtggctctatatacggatctggacagtcaggcggactccgacaactgcgtcaccctcatgaccatgcacagcgccaaggggctggagtttccatgcgtgttcgtggtgggcatggaggacggcctgttccccggcaaccgggccatgggggatgaggaggagatggaggaggagcggcgactgtgctacgtggccatgacccgtgccaaggagaagctaaccctcaccaatacccggcagcgcaccctgtacggccgtaccagccccgctatgccctcccgctttctcaaggagatcccggaggagaatatggagtggctggggaagcccgaaccccagcaggcggcgtcccactgggagggggagtggcagcgtcctgccgctgcgtcacaggtacgcacccgtcgggaggagccggtccgatctacaacggctccgtccgctccgtcggtgcgggctcgctccgcagcaccctctgcgcccctgatgcagctgcgggccggcgacagcgttcgccacaatgccttcggagacggtatggtgctcagcgtccggcccatgggcggcgatgcgctggtggaagtggcctttgacaagatcggcaccaaaaaactgatgctcaaggccgccgggacccatctgaccaagctgtga

SEQ ID NO: 2307 - DNA, 3948 bp, Oscillibacter sp.
atgagggaacagattgcattttttgatttttttgaaagcttcgtgccgcccagagaactgcggctgttgctccacgacgccgtcgtcacaggcggagcgctggacgtgaagcagcgggcgctggagctggacgtggccaccggggagcgcatcccggaggcagctcagacggcgctggagcagctgctgacccggcagtacggcctgcaccggctgcatctcactattcatgaccggaaggcggagaagaaaagcggcggcaccgaggtgctgctgggcaaggagatcaagggcaagcccgtctccatgacggagctgaacgtgaaaatgggtacagccatcgtggagggcaaggtctttgccgccgagtgccgggagaccaagcgccccggtatgtggatgttgagcttcgacatgacggactatcagagctccgtcaccgtgcgcaaatataccgaggggcaggaggcactggccctgcagaacgccatcgcccccggtatgtggctgcgggtgcaggggcagccggagctgacccgtgacggcaaggacattcagctcaagccctaccacatcatgaaggttccccatgagggccgcaaggacacggccccggagaagcgggtggagctgcacctgcatacgaagatgtccaacatggacgccctgacggatacggccgccgtcattaagcaggccatctcctggggacaccccgccatcgccatcaccgaccacggcgtagcccagtccttcccggatgcatggcacaccgccaagggaaagatcaagatcctctacggcgtggaggggtattatgttaataacctcgacgaccgcatcgccgtccacggtccgcaggatcagaattttgccgacgagatcgtgtgcttcgacatcgagaccacgggcctgaaggtggagcgggaggccatcacggagatcggcgccgtggtgctgcgcaacggcgaggtggcggagcggtttcagaccttcgtcaaccccaaccgccgcctgacgccggagatcgtgggcctgacgggcatcacggatgccatgctggccgacgctccccagctgaaggaggccctgacgagttttctggagtttgtgggggatcgcccgctggcggcccacaacgccgaatttgacatcagcttcatccgggccgggtgccggaaggtgggccttcccttcgatcccacctatgtggactccctgatcctggcacagaatctgctgccggagctgcacaagtataagctggatatcgtggcggagcatttggatctgcccgccttcaaccaccaccgggcttcggacgatgcggccatggtggcctatatgctgatcccattcttcgagaagatggagcgggagctgggcatccaccgcctgcaggagatcaacggggagatgctgaagctgcggcctcagggcagcaagaccagccgctttcccaagcacatcatcattctggccaagaacaagctgggcctcaagcacctgtatcagctgatctccgcttccaacctgaaatacttcaagcgggtgcccatcatccccaagacggagctcatcacccaccgggaggggctgcttatcggctcggcctgcgaggcgggcgagctgttccgggcggtgacggatcacaaggattgggcggagctcaagcgcattgcctccttctacgactatctggagatacagcccatttgcaacaatctcttcatgctgcgaaacggcgacgtgcagtcggaggaggaactgcgggagtataaccgcaccatcgtccggctgggggaggagctggggaagcccgtctgcgccaccggcgacgtgcattttcaggagccggaggacgagatctatcgccatgtgctgctggccagcaagaagttccccgatgccgatgcgccgctgcccatctacttcaagaccaccgacgagatgctggaggagttctcttatttgggggaggacaaggcatatgaggtggtggtgaccaatccccgccatattgcggatctggtggaggagatcgagctgctgccgccgggccagctgttcccgccgaggctggaaaactccgaggaggacctgaaccgtctggtgtgggacaagtgccacgagctgtacggcgaccagccgccccagctgatcgtggaccgcctgaacgtggagctgggcagtattctgggcaagtacgacgtggtgtatatgtcggcacagaagctggtgcagcggagcttggaaaacggctatctggtaggctcacgaggctctgtgggctcgtcgctggtggcctatatgtcgggcatcaccgaggtcaactccctgccgccccactaccgctgccccaagtgccgccattcggagttcatcaccgacggcagcttcggctgcggcgccgatatgccggataaggtctgccccgtctgcggggagcagtacgtcaaggacggcttcgacatcccctttgagacgttccttggctacggcggcggcaaggtgccagatatcgacctgaacttttccggggaatatcaggccagagcccaccgccacgccgtggagatgttcggtgagacgcaggtgttccgggccggtaccatcggcaccctgaaggacaagacggtgtacccctttgtcaagcactatctggaggagaacggccgggaggtgtcccgtgccgaggagaaccgcctcattcagggctgcgtgggggtgcggcgcaccacgggccagcaccccggcggtctggtggtggtgccggatgacatggatgtggaggatttcaccgccgtgcagcacccggcggatgccgaggacgccgataccatcaccacccattttgaataccactgcatggaggataacctcctgaagctggatatgctgggtcacgatgatcccaccatgatccggatgttggaggatcttaccggcgtcaacgcccgccagatcccgctggacgatccggacaccatgagcatttttgtttcctccaaggtgctgggctttgaaaacgacgagttgctgggccccaccggcgccgtggccatcccggagttcaacacccgcttcacccgtgggatgctgatggacaccatgcccaaggatttcaatacgctggtgcgcctgtccggcttttcccacggcacggatgtgtggctgggcaacgcacgggagctgatcgtcagcggtaccgcctccgttctggagacggtgggctgccgtgacgatatcatgctgtatctgatttccatggggctggaccccaaaatgagcttcaagatcatggaggccgtccgtaagggcaaggtgaaaaagggcggctttcaggagggctgggtggaggccatgcaggagcataacgtcccccagtggtatatcgactcgctggccaagatcggctatctgttccccaaggcccacgccgtggcctacgtcatgatggccttccgcatcgcatggttcaaggtccaccggccgctggccttctacgccaccttcttcaccgtccgggccaaggccttcgacgccgagtactgctgcgccggtatcgacgccgtgaaacagaagatccgggagatcgagaacaacaaggatgccaccgctgtggagaagaacctgatggtgacgctggaggtgtgctacgagttctatctgcgtggcttccactttgataccatcagcatctacgactccgacgccaccgccttcaggatcacggagaacggcctgttgccgcccttcatctccgttcggggactgggtgagtcggcggctctggacaccgtggaaaagcgcaagggaaagcgcttcatctcggtggaggagttctccacctgctgcaacaagctctccaagacccatatcgagcagctgaaggcgctgggctccttcgcaggcatggcggataccagccagatcaccctgttctga

SEQ ID NO: 2308 - DNA, 2091 bp, Oscillibacter sp.
atgggattgtctaaagcggtggtaaaaaaccgtgttctgatcctgatgatcgcattgatcctgctggtgccggcggtgtttgggatgctgggtacccggatcaactacgatatgctggattatctgcccggcgacatggataccgtcatcgggcaggagacgttgaaggaggacttcggcaagggagccttctccttcatcgtggtgcaggatatgccggtgcaggaggtagcccagctgaaggagaagatccagcaggtggaccacgtggagagcgtgctgtggtacgattccgtggcggacctctccatccccatggagctgctgccggataagctgtataacgagttcaataccgatgatgccacgatgctggcggtgttctttgactccgccacctcggaggacgtgaccatggacgccatccgtgagatccgctccatcgccggcaagcagtgcttcgtgtcgggtatgtcggcgctggtgacggatctgaaggacctgtgcgagcaggaggagcctatctatgtggcgctggccgtggcctgtgcctgcgccgccatgatgctgctgctggacggctggctggttccattcgtgtttctggccagcattggcatggccatcgtgtataacctcggcagcaacttcttcctgggagagatctcctacatcaccaaggccctgtctgcggtgctgcagctggccgtgaccatggactactccatcttcctgtggcacagctacaacgagcagctgaccctgcagagcgaccacaaggaggccatggcggtggccatccacaacacctttacctccgtcatcggcagctctgccaccaccatcgccggcttcatcgccctgtgcttcatgtccttcacgctgggccgtgacttgggcatcgttatggctaagggcgtgctgctgggcgtgctgggctgcgtgaccatcctgccgtccctgatcctggtgcttgataagcctctgcagcggacacggcataagtccctgatccccgatatgggaggctttgccaagggcgtgtgcaagattttccccgtgtttctggtgatcttcgccctgctcatcgccccggcctacatcagctatgataagaccaacgacgaggtatactacgacatgggccagtgcctgccggaggacatggagtacgtcatcgccaacaagaagctctccgaggagtttgacatcgcctccacccatatgctgctggtgaacgccgatctgccggacagcgacgtccgggccatgatcgacgagatggagcaggtgccgggcgtgaagtatgtgttgggcatggagagcgtggtaggtcccatgatccccatggaggtgctgccggattccgtgcgctccatgctggagagcgaccagtgggagctgttgctcatcaactccgagtataaggtggcctccgatgatgtcgatcagcagatcgatcagctgaacgccatcctgaagaagtatgacgagggcggaatgctcatcggtgaggccccctgcatgaaggacatgatcgagactacggatcacgacttcaaggtagtcaacgccatctccatcgccgccatcttcctcatcatcacgctggtggagggaagcttctccctgcccttcatcctgatcgccgtcatcgagctggcgatcttcatcaatctgggcctgccccatgtgctgggccagtcgctgcctttcatcgcccccatctgcatcagtaccatccagctgggcgctacggtggactacgccatcctgatgaccacccgctacaaggcggagcggctcaatggcgaggacaagaagaaggccgtcatgaccgccctgcggacctcggccccctccatcatcgtcagcggcatgggcctgttcgccgccaccttcggcgtggcgctgtattccaacatcgatatcgtgggctccatgtgtatgctgatggcccgtggcgctatcatcagcgtgctgctggtgctgctggtgctgccggctctgctgatcctgtgcgacggcatcgtgtgccgcaccacccgtggtatgacccatctcattggtaaacaggaggttgtaaaatga

SEQ ID NO: 2309 - DNA, 2292 bp, Oscillibacter sp.
gtgcatgaggtggcgaaggacttcggagtccccaccaagcagatcacggagatcttgaccaagtacgccgaaacgcccaagaaccatatgcaggtcttggaggatcgggagctgtctctgatctttgagtatctgacccagcacaatcaggtatccgggattcaggtgatcttcgccgagggggccaagcctaccgagaagaagcagcagcctgccgccaagcccgccgagaagaagtcggagggcaagggggagagccgtcccgccaagcaggagaccaagcccgtctcccgtgtgcctcagaccaaggtggtggacacccgcaaggccacggcggtgaatctggataagtacgacgagaagctgcaggacatggcggagggccgcaccggcggcggccgtcgggcccagcagcagacccagggcaaggagaagttccgcaacggcggcaagcgccgggacaacggtttttccaataaacgcaagcaggaggaggcggatcgtctgcgccgcctgcggctggaggtcatcaaaaagacccccgttaccgtgcagatccccgatgagatcagcgtgggcgagctggccagccgcatgaaaaagaccggcgcagaggtagtcaagtgcctgatgaaaaacggcgtcatggcctccctgagccagctcattgacttcgacaccgccgccatcatcgcagaggagatgggctgcaaggtggagaaggaggtagtggtcaccatcgaggagaagctcatcgacgaccacaaggacaacgagaaggatctggtaccccgtgcccccgtggtggtggtcatgggccatgtggaccacggcaagaccagtctgctggactatatccgcaacgcccatgtggccagcggcgaggccggcggtatcacccagcacatcggcgcctatcaggtgcagatcaacggcaagcccatcaccttcctggatacccccggccacgaggcatttacctccatgcgagccagaggagccatggtgacggatatcgccattctggtggtggccgccgaggacggtatcatgccccagacggtggagtccatcaaccacgccaaggctgccgggatccccattatcgtggccatcaacaagatggataagccggaggccaatcccgagcgcatcaagcagcagctcaccgagtacgggctggtgtgtgaggagtggggcggcgataccattgtctgccccatttccgccaagaccggtatgggcgtggacaatctgctggagatgctgacgctgaccgccgaggtgggtgagctgaaggccaaccccaaccgtgccgctcagggtacggtcatcgaggcccgtctggacaagggccgtggccccgtggccacgctgctggtgcagaacggcacgctgaagcagggcgatatcatcatcgccggtacctccgtgggccgtgtccgggccatggtcagcgacaagggccagaagatcacctccgccgggccctccgtgcctgtggagatcaccggcctcagcgaggcacctaccgccggcgccaccttcaacgccgtggccgatgagaagctggcccgtgaactggtggagcagcgcaaggccgaggagaaggccaaggccaacgcccctgtcaccaaggtctcgctggaggatctgttcagccagatccaggccggtgagatgaagaacctgaacctgatcgtcaaggccgacgtgcagggctccgtagaggcggtgaaggcttcgctggagaagctcagcaacgacgaggtgcgtgtccgtgtcatccacggcggtgtgggcgccatcaacgagtccgatgtgatgctggcctctacgtcgcaggccatcatcgtgggctttaacgtccgccccgacaacgccgcccgtgactccgccgcccgtgccaacgtggatatgcggatgtaccgtgtcatctatgatgccatcaacgagatcgaggccgctatgaagggtatgctggcgcccaagttccgggaggtgctgctgggccatgccgaggtgcgccagacctacaaggtctccggcgttggcaccgtggcaggctgctacgtgcaggacggtaagctccagcgcaaggactgtcaggtccgtctggtccgggacggcatcgtcatccacgagggtgtgctggcctccctgcagcgcttcaaggatcaggccaaggaggttctggccggctacgagtgcggcctgaccatcgagaagttcaacgacatcaaggaaggcgatattgtagaagccttcaccatggaggagattccccagtaa

SEQ ID NO: 2310 - DNA, 2646 bp, Oscillibacter sp.
atgagcgaactcaaacgcacccagctgtacgagatccatgtggcggccggcgcctccatggtggatttcggcggatgggaaatgcccgtccaatatcccacggggatcgtggcggagcatctgtacacccggcacttctgcagcctgttcgatgtgtcccacatggggcggctgctgatcgaggggccggagcggctggcatttttgcagcacgtcctatccagcaacgtggcgggtctggatctgaacatggcccagtactgcatcctgccggacgaggacggcggagccgtggacgatgcgtatctctaccgcttcgaggaggagcggctcctgctggtggtgaacgccgccaacacggagaaggatctgattcatctgcgctccgtggtgaaggactatgactgcaccatcacggatatcacctcccagtgggcctccatcgccgtgcaaggccccaagtccaaggatctgctgaccaccctctccggcggggtacaggtgacggagccgatgaagaacgccctgaacactctgaccttcgagggtcatgaggtgaaggtggccaagaccggctacaccggcgagcctctgggctacgaggtctactgccgcagcgaggacgctgcgtggctgtggaaccggctggtggagctgggcgcccggcccgccggtctgggcgcacgggacaccctccgcatggaggcgggcttccccctgtacggccatgagatgggcgtggatcccgacgggcagaggatgcccattttcgccgtgccgctggccaagttcgccgtgagctttgcgcctcagaagggggagttcatcggccgcaaggcgctggagcggcagtttgacgccttccggcgcatcatgaaccgggatttctccgactgcgccgccctgccccgccgcatcctgcccatcgccctgctggaccggggcgtcatgcgggccggaatggcggtataccggggcgagaagcaggtgggctgggtcaccagcggcactatggtcccctactacatcgctgagggtgagggactggagacggtcatcaccgaggagaccgccaagcgggccatcggcctgtgctatgtagacagcgacgttctgacggacgacgtggtggaggtggacatccggggccgccggctgaaggccgtgatcccggctcgccacatgagcgtgggggctccgccctatgcccgccctttgttgtaccggcggccggaggacgaggtgtctcagcccgccgaccgggccgccaaggcgctggagctgctgcatctggcgcaggataaccaccagtggcgccagcgccagtgcatcaacctcatcccctcggagaacacccccagccgggcggtacagctgctgtcggccagcgatccctcctgccggtacgccgaacacaagaagatcatctccttctatgataaggatgtattctactatcagggcaccaagttcatcgacaccgtggagcagctgctggcggagcagatgcggcagtatctgggctgcacccaggtggaaacccgtgtcatcagcgggcagatgagcaacatggccaccttctccgccctgatggactggaaaaaccgtctggatcgcaagcacaccccccagcggctgggctatgtgctgaacaaccacatcatccggggcggccacctgtcggcccaacccatgggcgctctgaaggactacatcgccgtggatccggtgaccgagcgcaccgccgtggtgaacttccccgtgtgccgggacgatctgttccgcatcgacgtggaggagaccaagaaggtcatcgaccgctaccgcccggagctgatcatcttcggcaagagcatggtgctgcgccgggagccggtggcggagatccgccgcttcgtcacggagcagaacatccccaccaccatcatgtatgacatggcccacgtactgggtctggtgggtgaccacttccagaagccctttgaggagggcgccgagatcgtcaccggctccacccacaagaccttcttcggtccccagcggggcgtcatcggcgtcaactatcgccgggaggatctgaagtgggggctgtgggagaccatccagtcccgtgccttccccggcagcgtctccaaccaccatctgggtacccagctgggtctgctgatggcggcctatgagatgaactacttcaaggacagctatcagaaggccgtcattgacaacgccaagtactttgccaaggccctccatgaggcgggtctccacgtgctgggcgatcccgccatcggctacaccgaaacccatcaggtgctggtggacgtgggctacggcaccggcccggaggtagccgagcggctggaggagaacaacatcatcgtcaactatcaggccacccccgacgaggagggcttcaccgcctccggcgctctgcggatgggcgtcagcgaaatgacccggtttggcttcggccagacggagttcacggagctggccggtctgatggcggactgcatcctgcggggaaaggacgtagggcaggaggtctccctcctccgcagccgctacaccaccatgcactactgcttcgacggcccggagttccaggcggcgctggagcagttcatggggcagatcggcttttga

SEQ ID NO: 2311 - DNA, 2634 bp, Oscillibacter sp.
atgcgtaaagaattgccgaaggtatacgatccccgtgaggtggagccgcatatctatcagatgtggatggacaacggctgcttcaaggcggacgccgacccgaagaagaagcccttttccatcgtcatgcctccccccaacgtcaccggccagctgcacatgggccacgccatggactccacgctgcaggatatcctcacccgcttcaagcggatgcagggctattccgccctgtggcttcccggcaccgaccacgccggtatcgccacccagatcaaggtggaggagcgcctgcgggaggaggagcacctgacccgctatgatctgggtcgtgaaaagttcctggagcgtgtctgggcctggaaggagaagtacggcaaccgtatcgtggagcagcagaagaagatgggtgcctcctgtgactggtcccgctcccggttcaccatggacgagggctgctctcaggcggtgcgtgaggccttctgcgagctgtatgacaagggcctcatctacaagggcagccgcatcatcaactggtgcccccactgcctgacggcgctgtccgacgccgaggtggagtataccgacaagcccggccacttgtggcatatccgctacccgttggccgacggcagcggcgatatcgtggtggccaccacccggcctgagaccatgatgggcgacaccggcgtggcggtaaacccggaggacgagcacttcaagcacctcatcggcaagacctgcatcctgcccatcatgaaccgtgagatccccattgtgggtgatgattactgcgagatcggcttcggcaccggcgccgtgaagatgacccctgcccacgatcccaacgacttcgaggtgggcctgcgccacaatctggaggtgatccgtgtcatcaacgacgacggcaccatcaacgaaaacggcggcaagtacaacggcatggaccgctacgagtgccgcaaagccatcgtcaaggatctggaggagcagggctatctggtcaagaccgagccctattcccacaacgtcggcacctgctaccgctgccacaacgacgtggagcccctgatctccgcccagtggttcgtgaagatggagcctctggccaaggaggccatccgggtggtgaaggacggcaccatcaagtttgtgccggagcgctttaccaaaacctatatcaactggatggagaacgtccatgactggtgcatctcccgtcagctgtggtggggccaccagatccccgcatggtactgcgacgagtgcggacacatcaacgtcagccgtcaggatcccacccggtgcgaaaagtgcggctgcacccacctgacccgtgaggaggacgtgctggatacatggttcagctccgccctgtggcccttctccacgctgggctggcccaacaaggactccgaggacctgaggtactggtaccccacctccgtgctggtcaccggctacgatatcatcttcttctgggtggcccgtatgatcttctccggcatggagcagatgaagcaggagcccttcaagacggtgtttatccacggtctggtccgggatgacaagggccgtaagatgtccaagtctctcggcaacggcattgacccgctggagatggcggacaagttcggtgccgatgccctgcgcttcaacctcatcaccggcaatagccccggcaacgatatgcgcttctttgtggagaaatgtgaggccatgcggaactttgccaataagatctggaatgcctcccgctatgtgatgatgaacctcaccatcgaccatgtacagctaccggagcagctggagctggaggacaagtgggtcctcagcaagctgaataccctcatccgggaggtcacggataatatggaggcctatgaactgggcgtggcctccgccaagatctacgacttcatttgggacacctactgcgactggtacatcgagcttaccaaggcccggctgtacggcgaggacgaggaggccaagctggcggctcagaacgtgctgtgctatgtgctgctgcgggtgctggagctgctgcatcccttcatgcccttcatcaccgaggagatctggcaggcgctgcctcacgagggagacttcctgatccgggcccagtggccggagtatcaggagcgcttcgccttcactcaggaggaaaacgccatggaggcggtgaaggacgccatttccgccgtccgggcccggcgctccgagatgaacgtgccgccctcccggaaggccaagatcctcatcgtcactcagaccccggatatctatgccggcggacgtgacttcatcatgcggctggcctacgccagcgaggtggaggttcaggcgcagtctccggaggatctgaagggtatggtcaccgtggccacccacaacgccaccctctatctgcctctggcggagttggtggacatccggcaggagttggagcgcatcgccaaggagaaaaccaaggcagaggagaatctggcccgcatcgagaagaagctgcaaaacgagagcttcgtgtccaaggccccggaggccgtggtcaatgccgagcgggagaaggctgacaaggcccgtgcgctgatcgccaagctggaggagtccgcggcggccatgcgtgactga

SEQ ID NO: 2312 - DNA, 3132 bp, Oscillibacter sp.
atgctgctgaaaactgcttttcgggagatcaaaaccagcttgggccagtatctggccattctggccattattgcgctgggtgtgggcttttttgccggactgcgggtgacccgcaccgctatgatctccaccgccaatcactatttgaaggatctggccatgttcgatgaccggatcctctccactctgggctggacggaggaggatgtggatgccttccggaagctggatggcgtatccgccgccgagggcgcccgttccgccgacgtgctgtgcgtgggggaggacggctccgacatggtgctgaaggcccactccctgacgcagcaggtgaaccgcctgagcttacaggcgggacggctgccggagaaggctgacgagtgcgtggtggacgcatggcgctacgatgagagcgcactgggcagcgtcatccggctgtcggacaacaactccgccgatacgatggataccttcgccagccgggaatatacggtggtgggcgtggctgccagtcctatgtacatcaactatgagcggggcggcacggcgctgggaaacggcaccgtggcggcgtttgtctatctgctgccggagggctttgcgatggactactacacggagatcgacgtgaccctcaccggggcagatggccgcatctatacggcggcctatgacgatgccgtggaggccatggagcagcctctgaaggagttggcggcccagcgggcgcagctgcggtatgacactctccgcagtgaggcacaggaaaagctggcggatgcccagcagcagttggacgatgcccggaagcagctggaaacgggctgggcggaatactacgacggccttgccaagtaccaggacggacaggcatcctatgtggagggcgccggtcagtaccgggatgggctggcagaatacgacagtggccgggcggcctatgaggcggcccggaaggactatgaaaacggcgtgagccaatacgatcaggggcagaccggctatgaggagggccagcggcagtatcaggcggcacagcagcagtatcaggcggcgctggcgcagtatcagctgctggagcagcaggcggcggccctgccggaggatagcccggagctgccggtcctgcaggccaagctggcggccatgaaggagcagctggacgccacagcggcgcagctttctcagaatcaggctcagctggaggcaacggcggcgcagctggcccagagcaaggcccagctggatgcggcgggtgcggcgctggataccacggagcagcagctggcacaggcacaggagaagctggaggagtcggcccggcagctggcggcggccaaggcccagctggaggagacaggtcccaagctggagagcgcccggcaggagctggaggacggcgaaagggaattgtccgaccatgagggggaactggacgatgcccggcagaagctggaggatctgaaagagccggacacctatgtgctgggccgggacaccaacgtgggctatgtatgcttcgagagcgacaccaacattgtggcgggagtttcccgtgtgttcccgctgttcttcttcctgctggcggcgctggtgtgcattaccaccatgacccgcatggtggaggagcagcgcacccaactgggcgtactgatggccatgggctatggccggggggccatcctgttcaagtacttcttttactccggcagcgcttcgctgctggggtgcgccatcggctttgtgggaggctcctacatctttcccaagatcctctggcacgcctataacatcatgtacggcttcgggatccccattgaatttgtgctggatgggaagctgacggccatctccgtagccacctatctgctgtgcgctctgggggccacctatctggtgtgccgtggcttcttgcgggaggtgccggcggaactgatccggcccaaggcccccaaggagggcaagcgggtgctgctggagcgcatcaccttcctatggaagcggctgggctttttgaccaaggtatccctgcggaacgtgctgcggtacaagcagcggttcttcatgatggtgctgggcatcggcggctgcacagcgctgctgctggcgggcttcggcatcaaggactccatcgccaatgtggtggactatcagttcgaggaaattaccctgtacgatgcggcggtgtccttcacagaggagatggatgcgcagacgcagcaggcgttttcccggcaggccgccgatgtgtcggcggtggtgttcctccacgacggctccgtgacggtggaggcaggcggtggggccaagacggtgaatctgctggtgcctcagagcagtctggagggcatgatggacctccaccggggcggcgagaagctgtccatgcccggaacgggggagacgctgctcaacgacgctctggcggaggcgctgggcgtgtccgtgggggacaccgtgaccctgcgggacagcgacatgaacaccctgacggtgacggtcagcggcatctttgacaactacgtggccaactacgccatcgtatcgccggagacctgccgggagcagtggggcagcgtgccaccggtgaaaaccgccttcatccgggtggcggataactccgacgcaggcatccacgccgcctcggcccggatcctggatctggagaatgtctcggcggtatcagtaaatctggacacccgccagcgggtggggaccatgatgtcggtgctggattacatcgtgtggatggtgacggtgtgcgccggggcgctggcctttattgtgctgtataatctcaccaatatcaatatcaacgagcgtatccgggagatcgccaccatcaaggtgctgggcttctatcccggcgagacggcggcctatgtgttccgggagaacaacaccctgacgtttttggggatgctggtaggtctgccgctgggcaagtggctccacgcctatgtgatgagccagatccgcatcgacaccatcgccttcgacgtgcggatcgcatggcagagcgtggtgttctccatgctgctgacggcggtgtttgccgccatcgtggacgtggtgatgtacttcaagctacggcgcatcagcatggcggagtctctgaaatccatcgaataa

SEQ ID NO: 2313 - DNA, 1137 bp, Oscillibacter sp.
gaaagtgaggtaacaaaaatggtcattggagtattgaaggaaatcaagggcaatgaataccgtgtggcggccgtacccgccaccgtgcatgagatcgtgcgtcacggtcacaccgtgtacgtggaaaccggcgccggcgtaggcagcggtttcagcgatgcgcagtatgaggctgccggcgctatcatcgccgacaccaacaccgtctgggagaaggccgacctgtactacaaggtcaaggagctgttcccccaggagttcaagtggatgaacaaggacaagatcctcttcacctacatccactccaacgctcaccccgacgagacggacaccctgctggacagccacgtctccgccgtggcctatgaggatgtgcaggacgaggagggcaagttccccctgctgcgccccatgagcgagctggccggtaagggcggcttcctggcggccctgcactttgcccagtccgtcaacggcggccccggcaagctgctggccaacgtcaccggcgtggagacccccatcatcaccatgctgggctgcggcgtggtaggtaccggtgctgctgagctggctgctgccttcggcaacgaggtgcgtattctggatgtcaacatgaacaccatgctggccgccaagaagacctcccccgccaacatcacctacatgatctccaaccgctccaatctggagaagtgcctgcgggagtccgacgtcatcatcaacggcatcctgtgggccaaggaccgcaaggatcacattgtctatcgtgaggacctgaagctgatgaagcccggtgccatgatcgtggacgtggcctgcgacgagaacggcgccattgagacctgccgggataccacccatgatgatcccatctacttcgtggacggcgtgatgcactactgcgtggacaacatcccctccgctttctcccagaccgcttccgtgacgctggccaatgccaccctgccctatctgctgcagatggcggataagggctttaagaaggccatggaggataaccgcctgctgcgtcttggcatgacctgctacgacggcaagctgaccctgaaggagacggctctgaagcagaaccgtgagtggaccgacgccgacgagctggtcaaggtctggtaa

SEQ ID NO: 2314 - DNA, 3411 bp, Oscillibacter sp.
atggcgaagatcctcgcgtttgttctggcagtttccctcgtattccctgtgtctgccttcgccagcgtggctgatctggcagatgacacccgtgctccaggcaaatctctggcaaacacctaccccaacctgccggtagactggcaggtatctctggctgaggacaccaaggacgtcaccgtaaaggttcccgtatccctgaccgctgacgagctggccgccgccatcgaggcgcagtccatcagcttctccctggtacgtgacggcgagcgtcagtacctgaaccccgagaagttccccaacccctgggagggcggcacactggatcagtgggtcacccagaacaacaaagagaccgtccagatgtttgacatcaaggagatgggcgttgcgaccgacaacgacggtaaggtgtatctgaacgtcctgatggacatcaactgctacttctacaatgcccgtgtcaatggcggtgtcggagatgtggactacagcgctccccacaacaacggcggtgcgtatctggacatctgcggctacttcaacttcaacgccatcgtggcggagaagaccgtgggcagtgtggctacgaaggtcgttccctatgacaccttccgcaccatctatgagctgtacgacgatgtggatgctctggccaacgccgagaccgatctgtacgtctcccgtgagtccatgggccgttccaccaccgacggctacgacatcccctacgtgatcattgccgaccagaaggcgtccgtggaccgctggctggagtacaccgaactggtggagcaggatcccgatctggtcctggctcagctgaaggaaggcaagtgggatgacctgcgtgtccccatgttcgcctccaacgtccactccaacgagaatgccgccgtcaacggtattctggagttcggccatatgctgctggagaacgagaccgttgacgtcaagaccctgacgggcttcacagatgccggtaaggatcttctggccgaggaaatggcaagaaacaatgccaagacccccgacctcatcaaggattacgcctcctatctgggctacatccgtggcgagaacggctacaaccactggaccaccagcggctcctccaagggcctgtactccgggcagttggatctggagaagtactacaacgttgagagcgaaaccgtgaatattaaggaactgctgaccgacgtgttcgtcgtcatcgttcctgagcagaacgtggagggttatgagcacatgacccgtaccagcggtcagggctatgaccccaaccgtgacgaggccaaccagactctgtttgaggatgccaacgctatggctctggtgaacaagttcaatcccatggtctttaccgagatccatggccgtgtggacgccgtcctcattgagccctgcacgcctccccacgagcccaactatgagtatgacctgatcgctgagcagttcattaagctgggcgaggccgtcggtatcggcgccatcgccaacaaccccgatcacaacagcttcgagatgcctttccgggatttcctgagaggcaacgaggattcccccaccggcaaggagtggacccagccttgggatgatatgaccacggcttacggttctcagtatcccgtgctgatcggcaccgccggcatcacttgggagctgcccgtgtatagcgatatcagcgccgagtacatggttccctacggcctgatgactcaggctatgttcatccgtgacaacaagatctccatgctggagaatcaggccaagctgttctcccgtggcgtgagcaacaccaactccaacgccgatgtggctccctggtacgtgaaccagtacgacgaggccggcgctcaggctgagctgatgcgtcccgtgtacgacggcgagggtcagaacggcaacttctatcccgagtgctacatcatccctctggatcgtgacaaccagaagaacctcttcgacgccgctgcggagctgaagtatctgacccgcaacgatgtcaaggtcaacgtggccaccgagtccttcgtctatgacggcgtgacctatcccgagggcaccatggtcatctccatgtatcaggccaagcgttctctggctaacagccagctgtacgacggcaccttcatcagcgtgtggtccggcctgtactccgagagctttgcccagcgcagccatgcccgcggctatgaccgtatcatcgtggccgagcccgccgcctatgagaccatcatgcagtcctgccaggctaccatcgactatgagggcactctggccgctctggctgagtgcaccgccgacttcgacggcgttgagaatgccgatgtcatcatcgacaacgtctccaacgattccgccaatgccgtcaacgctctgctgaacgccggcaagaccgtggccatgatcaccgagggcgaggagaagggcaacttcctgtgctcctatgaggacttcctgaccatcgccgatgagtatgtcgtgaccgccaccggcgtgtacggcgccaactacaaggccgccgtcatcgacaaccccaccgtgtatctgcccggtaagcccgccaacaacaccagcggctacgtggagaccactctgcgctccggctcttacaactatcgtttcgactggctggctctgaccaatatgggcttcaccgtcaccgacgacctctccgctgccgacgtcatcgtgggttcccgtgctctgaatgatgaggctctgggcgctgtcaaggccggtactccctacatgggctataccgacaccgccgttagccgggtcagggagctggtgggtctggagatttcttcctgcgagatgggtaccgacttcttgggccatgtgacctatcccaacaacactctcatcaacgccacctacatcaacgagggtgacgacgtgatgtacgagtatggtacctattggttctccaagatccctgagggcgctaccgttctggtgcagaacgccgggaaggatcccctgcagggctgcatctgcctgaccgacgacggtctggtgaagcagttcgagacctacaacaacggtgtggtgggcttcgagtatcagtccggcaacatggacatcgctctgtttgccaatgtactgaaccacaagatccatcagacggatgaattcaccttcatcagcaacttcatcttctctcgcagcctgagcgccgtcgcttacgagggtgtccagcagcctgaggatcctgagcccgacaaccccgaccccaagcccgatcctaagcccggtgattccggtaccaccgatcccaagcccactacgcctcccgagaccggcgacaccagcgacgtgatgctgtgggtggctgtggccgttatcagctgcggtatgatccccgccgctgcggtggtcctgaagcgtaaggctcgctga

SEQ ID NO: 2315 - DNA, 1806 bp, Oscillibacter sp.
cgcagctcccgcaccggcatcccatcaggggatgccggtgcttttttgcgggctgccgggttttttccggggaggtgtgagcgcttttcccgcatttttttgcaaaaacgaaactttctcttgcaaaccgtggggaaatgtggtacattgcacttcgacaactgcatatcgacaggccctcgccgggtgatgccacacgatcacacaggccgggggcgaccattatttctggcctgccgccgaaagggcggcaaggaaggagaagacatgaagaagagactattggctcttttcctgacgctgggactggtctgcaccgtactcaccgcttgcggagacggcagcaaagaccagggcggacaaggaaataacggcggcgaagcagtcagcggcggagagatcaccgttggcatcgccaaggacctggatgacagtcttgaccctcaccggatggtgaccgcaggaaccagagaggtcttgttcaacctgtttgagggcttggtaaagcccaattccaagggtgaattgatccccgctgttgcggagcgctaccagctgtctgaggacggaaggacttatacctttaccctgcgtgagggtgtgaagttccataatggcgcaacggtaacggcggaggatgtggtatattccatcgaacgctgcgccgatacatcggagggtacgcctctggtgccggcgttttctgttatccaggaggtcaaggccgttgacgaaaggaccgtgaccatcaccattgcccagcgggatctggagttcatcagctatctcaccagcgccatcatccccaagggctacgacgatcaggctacccatcccgtgggtaccggcccgttcctgtatgtgtcccgctccccgcaggagaacttcgtcatccagcgctttgacgattactgggggacccccgcctatctggataaggtgacctataaaatttacgagagtgccgatgcgctggtgacggccctgaagggcaagtccatcgacctgtgtgcccatctgacctcgtctcagacggcgcagctggacagcgacttccagatcctggagggtaccatgaatctggtacaggcggtgtatctgaacaacgccgtggccccctttgacgatcagcaggtgcgtcaggccctgtgctacgccatcgaccgccagaccatcatggacatgatcgctgacggccacggtacggcgctgggcagcagcatctatccggccttcaccaagtacttcctgccggagctggtgcagaagtacccctatgaccccgccaaggccaaggagctgctggcacaggccggctatcccaacggctttgacatgaccatctccgttccctccaactatcagccccatatggacacggcggaggtggtggccgagcagctgcgtgctgtgggcgtcaacgtcaccatccagcccatggagtggggcgtgtggcatgagcaggtctataagggccgggacttccaggccacactggtgggtctggatgccagtgccatgacggcccgtgcgctgctggagcgctttacctccggcaacgccaaaaactttgtcaactacaacaatcccgactacgatgcgctgttcacgcaggccatgaatgcctccgacgatgcgcagcaggcggaggtctacaagcaaatggagaccatgctctccgacaccgccgccaacctgtacattcaggatctggcggatctggtggccatgcgtcagaatctggcggggctggagttctaccccatctatgtgctggatctgtccacggtgcattttgtgaaataa

SEQ ID NO: 2316 - DNA, 2601 bp, Oscillibacter sp.
atgaaagaacactccaacgaccgtgataaggcagagcagagcgcccatcagaggaaaaaccgagggaagggacgggccaagagggtctggggcgtcatcggcaccatcgtgctggtgggtgtgctgaccatggccatttttgtggggatcttcatgacctacatcaataagtccctgaagggccacgtagaggtggatatgtccgaatatgaccggaaggtatccacggagctgtaccgtctggggacggacggcgagacatgggagatgtatcagacgctgttcagcgatgaaaaccgcatctgggtggatatcggggacatccccgagtatttgcaggaggccaccatcgccatcgaggacaagcgcttcaagtcccaccacggggtggactggagggggaccctgcgggccatcaccaggaccctgaccggcagcggcacacagggcggctccaccatcacccagcagctgctgaaaaacgtcaccggcgacaatcaggtgacggtgaagcggaagatcacggagatctaccgggcgctggcgctggagaaggattactccaagtcccagatcctggagatgtatctcaacaccatctatctgggagagcagtgctacggcgtgcagacggctgcccggatgtacttccacaaggatgtgaaggacctgacgctggcggagtgtgcctgtctcatcggcatcaccaacaatccctccatgtatgatcctctgctcagcgactgggcccgtgagaacaaccgggagcggcagctgaccatcctgggcgagatgctcggtcaggagaagatcgatcaggccacctacgatgccgccgtggcggaggaggtccagttcagcgacgggtatacgaatctcggcaatttcaccgagcctacggaggatcaggagaccccggagaagcccaccgtgcagtccaccgccaacaactcctattatacggatcaggtcatctccgatgtggcggcggcgctggtggagaagctggggctggaggacgatgcacccgacgagaacggcaacgtccgtacggcacaggagaaggccgtcagcaagatttacagcagcggctataagatctatacgctgcaggacagcaagctccagtccattgcggagagcgtttttgaaaacagcgatctggtggagtatactgacgactacggcaagcccttgcaggcggctatcacgctggtggacaattccaccggcaacgtggtggctatggtgggcggtctgggcgccaagacggtggatcgtggctggaactgggccacggagccccggcagtgcggttctgctaccaagcccatctccgactatgccccggcgctggacgacggtaccatcaccgctgcctccgccatcgacgactatcccgtccgggatttgagtggctacggcgcatggcccaagaactcccactccggcttctacggcttgaccaccgtgtggacggcgctggtggagtctctgaatacctgcgccgtgcgggtcaatgagagctacggctcggcggcctcctataattatatggtggagaagctgggcttcaccaccctgacccagcgggacagccagcagtccggtaacatgggcctgggcggttacgacgtgggtgtcaccacggaggagatggctgcggcctatgccgccatcgccaacgacggcgtatacaccaagccccggacatggctgcgggtggaggactccgaggggaatgtcgtcatggagaacgagacctccgcccacagcgccatgaaggagactaccgcctatctgctgcgggatatactggagagcgttatcaccagcggtaccggtacggaggcatatttctccggcatgaccatcgccggtaaaaccggtaccacggacgacaaccgggaccgttatttcgtgggcttcagcccctactactgcgctgcggtatggacgggctatgagtccaacgatgagctgtcctacggtatgggcaacggctcggcgcagctgtggaagcaggtgatgcgggagatccatggtgatctggaggacaaggccttcgacagctgcaccggcctgacgcaggtgacggtgtgctccgacagcggcctgctggccacggatgcctgcaccaaggacctgcggggtagccgggtccgcaccgtgacggtggcggcagatacggctcccacggcgacctgtaacgttcacaagatggtggattattgcaccgaggggaagcatattgccacccagtactgccccaaggataaggtgaagcaggtggccgtgctggattggaaccgggcgctgttcaacgatatcaaggccagggaccatgagtacctgttgaaggtgctggacggctccgctacgcccaacgatcccaaggatgatatctgcccggcgcaccagaaggccatcacaccggtgacacctaccgaccccaccaaaccgacaacccccaccaaaccgacgacccccacggatccgacagatcccaccacgccggataccggcggcgctgaggactccggcggcgttggggactccggcggcgttagaggcggcggcagctggtggaaacgaccgtaa

SEQ ID NO: 2317 - DNA, 1737 bp, Oscillibacter sp.
atgaccgaggaacgaaacaccgccgcccctgagacggaggagagcagaaactttattttgaacctaatcgaccaggacatcgcagagggtggtcagttccagggacagaccgtccacacccggtttccgccggagcccaacggctatctgcacatcggacactgcaaggccctgtgcatcgacttcggcaccgccgagaagttcggcggtctctgcaacctccgcatggatgacaccaaccccgctaaggaggacaccgagtacgtggacgccatccagcaggatatccattggctgggctttgactggggcgaccgctttttctacggctccgactacttcgagaaggactacgagtatgccgtggagctcatcaagaaggggttggcctacgtctgcgagctgacgccagaggagttcaaggccaaccggggcgacatcggcatccccgctacctccccctatcgggatcggcccatcgaggaaaatctgcggctgttcgaaaagatgaagaacggtgaggtggaggagggaaagatgaccctccgggccaagatcgatctggccagcggcaatctgaatctccgtgaccccatcatctaccgcatccgcttcatcaatcaccaccggcagggtaccaagtggtgcatctaccccatgtacgactttgcccaccccattcaggatgctctggagggcatcacccacagcctgtgctcactggagttcgagtcccaccgaccgctgtatgactgggtggtcagcaatgtctccatcccctattacaagccccggcagatcgagtttgcccgtctgggcattgaccacacggtgatgtctaagcgcaagctgcgtcagctggtggaggagaagttggtctccggctgggatgacccccggatgcccaccctgtgcggcctgcgccgccggggctacaccgcccgctccatccgcaatttctgcgagcgcatcggcgtggctaagtcccccaacaccgtggagtacggctttctggagcattgcctgcgggaggatctcaacgccacggcccagcgcaccatggcggtgctgcacccggtgaagctcacggtcaccaactatccggaaggacagagcgagaccttcaccgtggagaataaccccaccgatcccacgcagggtacccatgagatcaccttcggccgccacctgtggatcgagacggaggattttctggagatgcctattcccaagtataagcgcctgtaccccgacggcccggagtgccgtttgaagggtgcctacctcatccgctgcaccggctgtgtcaaggacgagaacggccatgtgacggaggtgctgtgcgagtacgaccccaacagccggggcggcgaccccgccgacggacgcaaggtcaagggcgctaccctccactgggtggatgccgacaactgcctggatgccgaggtgcggctgtacgacaacctgttctccgatccccagcccgacggcccggacaagaatttcctggactgcctgaatcccgactccctgatggtgctgcggggctgcaaggtggaacgcagcatggccgctgtggcagaggagttcgaccgccgggagaaccgtaccggcgtcaacgcacccactttccagttcatgcggaccggctatttctgcatggataaccgggactgcacggcggagcatctggtgttcaaccgcagcgtttctctgaaggacagcttcaagaagtaa

SEQ ID NO: 2318 - DNA, 1560 bp, Oscillibacter sp.
atgaaaaagctctcacgagccaaaaataccatgcggaataccctttggggcgccatctaccgggtggccaccctcatcgggccgtttgccatcaagaccatcatcatcaaggagctgggacaggagtataacggcctgtccaccctgttcacctccgtgctgacggtgctgaatctggccaatctgggctttaacagctccttggtgttcaccatgtacaaggccattgccgaggatgacaagccggccctgtgcgccatgctgaaattctaccggaaggtctaccgcatcgtgggtttggtgatcctgggcatgggtctggcggtgatgccgtttttgccatggctggtgaaaaacgagtgtccgccggatgtgaacctgtacgtcctcttcgccatctatctgtcggagagcgtgctggattacctgatgttcgcctataacaacgccacgtttaccgcctttcagcgcaacgacgtgacgctgaagatctccaccgtgcgctatgtggtgcagtataccctgcaggcggcggtgctgctgatcttctccaattactatgcctatatcatcctgctgccgctgatggtgatccccaacaacgtggcggtgtatctggcggcccggaagcactacccggacatcgtgtgtcagggtgagctggacccggtgaccaaaaaggatatctataagcgggtggggacgctgttcggccataagctgggcaacacctttctggtgagcatcgacagcatcatcatctcctcctttctgggactgacggcgctgtcgctgtatagcaactattactatatcctcaccgccgtcaatggcctggtggagatcgtcaccaacggcagcctctccggcatcggcaataagctgctgacggactcccgtgaggacaactaccgattcttcaaaaccatgacctatggctgggtggcgctggtgggcggcgcagcggcgtgtatgctgtgcttttaccagcccttcatcgccgccgtgtggcttggcccggagtatctgctggatgagcggctgatgatgctcatcgtgctgtacttcttctcgtggatgttccgcatcatgcagctgacctaccgggatgcagcgggcctgtggacggaggattggctcaagccctatgtgggcatggccgtgaatctggtgggcagcatctggatggtgaaggccaccggcagcatcgccggcgtgctggttcccaccattctggtgttcttcttcatctataccccgtgggaagcgtgggtggtggtgaaataccagttctaccgcagctggaacgaatacatgggaaagctgctgggctatgtgctgctggcctttgccgcctgcgccgcctgctacggtgcgtgccggtggctgtcgccggacaataccatcctgtcactgctgctgaggtgcgtcatcgtgggcgttatctaccccggcatctggctgggcgtcaccggacgcacggcggagtggaagcagctgtggggcattctgctgcgctttttgcccaaggggaaaaggccgcataagccggtggcataa

SEQ ID NO: 2319 - DNA, 1686 bp, Oscillibacter sp.
atggccaccggctgcaagccgtcctgcggagcaagggccgaaagtgcgtccgggagtgcgggggatgcagacgccctccggcaggccgccgtcaccggccatagagcgataaacgagagtggaaccgtggagcagccgcttcgcctctcatgcctgcgggcatgggaggcgttttctgttctgcacggagctttccgaattttgcagctaaaatttgcagccaaaaggagcttgactatgtatctgtataattctgtcacccataagaaggaggagttccggacccacacgccgggccacgtggagatgtatacctgcggccccacggtgtatcactttgcccacatcggcaacctccgcagctacatcatggaggatgtgctggagaagtacctgcgctatgtgggctacgatgtgaaccgggtcatgaacatcaccgacgtaggccacctgacctccgatgccgacgagggcgaggacaagatgctcaagggcgcccgccgggagcacaagaccgtcatggagatcgcccagttctacaccgacgccttcttcgaggactgccgcaagctgaacatcaagcgccccgacgtggtgcagcccgccacggggctcattgatgactacatccgcatcatctcccgcctgctggagaaaggctacgcctatgtggccggcggcaacgtgtacttcgacaccagcaagctggagcggtactacgtgttcaacgaccacaacgaggaggatctggccgtaggcgtccgggagggcgtggaggaggacgtgaacaaacgcaacaagaacgactttgtgctgtggttcaccaagtccaagttcgaggatcaggccctgaagtgggattccccgtggggcgtgggctaccccggctggcacatcgagtgctccggcatctccatgaagtacaacggtgagtatctggatctccactgcggcggcgtggacaacgccttcccccaccacaccaacgagatcgcccagtcggagagctatctgggccacccctggtgcccccagtggtgccatgtggctcacctcaacaccagcagcggcaagatgagcaagtccaagggcgagttcctgacggtgtccctgctggaggagaagggctatgcgccggtggtataccggttcttctgcctccagagccactaccgcaagagcctggtgttcagctgggagaatctggacaacgccgccgtggcctatggcaagctcatcgccaggatcgccgccctgccggagaaggacggtgcggtggatacggctgcggcagagactttgcagcagaagttccgcacggccatggacaacgacctgaacacctccatggcggtgacggtgctgtatgacgtgctgaaggccaagaccaacggggccaccaagcggtatgtgctggcagatttcgaccgggtgctgagtctggatctgctggagaatgccgcccggaaaaaggcagagcagaagcagaccgctccggcctccggcgggttccagatcgtcagcgagagcggcgagacggacgctcaggtggaggctctgctgcaggcccgctacgacgccaagaaggccaaggacttcaccgaggcggaccgcatccgggacgatctgaaggccatgggcgtggagatcacggacatccccggtggtgtgcgctggaagagataa

SEQ ID NO: 2320 - DNA, 3423 bp, Oscillibacter sp.
atgcagaccaaagaaatccaaaaggtgctggtggccaaccgtggcgaaattgccatccgcattttccgtgcctgccacgatctgggcatccacaccgtggccatctactccaatgaggacacctattcgctgttccgcaccaaggcggacgaggcgtatctggtgggggagaagaaatccccgctgggggcgtatctggacatccccggcatcatcggactggccaagcgccggggcgtcaccgccatccatcccggctacggcttcctgtcggagaacgcagactttgccagagcctgcgaggaaaacggtatcctgttcatcggcccctctgccaaggtgctggggcagatgggcgacaagctcagcgccaaggagatcgctctggcctgtggtgttcccatcatccccggctgcacggagcctctgcgggacgcagaggacgctgtggagaaggcggtgtccttcggcttcccggtgattttgaaggcggcggctggcggcggcggtcgtgggatgcgccgctgcgacagcccggaggaggtccgcaccgcctatgagctggtccacagcgaggcggagaaggccttcggctgcggcgatattttcatggagaaatatctggtggagcccaagcacatcgaggtgcagatcctggcggaccagcacggcaacgtctatcatctgggcgagcgggactgctccctccagcggcggtatcagaaggtggtggagttcgccccggcatggtccgtcccgcaggagacggtggaggcgctgcgccgggatgccgtgaaaatcgcccgctcggtggggtacgtcagcgccggtacggtggagtttctggtggataagaacggcggctactacttcatcgagatgaacccccgcattcaggtggagcatacggtgacggagatggtcaccggcgtggatatcgttcgaagtcagatcctcattgccgccgggtatcccctgagtcacccggagatcggcctgaaccggcaggaggacgtccacgtcgacggctacgccatccagtgccgtgtgaccaccgaggaccccgccaacaactttgccccggacaacggcaagatcacggcctactcctcctccggtggcttcggcgtccggctggacggcggcaacgccgacgtgggcaccgtcatctccccctactacgactcgctgctggtgaaggtcaccagttgggatcataatttccccgccgcctgccgcaaggcagcccgtgccatcaacgaggtacgggtgcggggcgtcaagaccaacatcccctttgtcaccaacattctggcccatccggatttcgtggcgggccgctgccacaccaagttcatcgacgagacgccggagctgtttgacatcgtggactcccgtgaccgggccacccgtgtcctgcggtacatcgcagagatccaggtggccaatccgaatgccgagcgccatcagtacgacaccccccgcttccctcagcctcaggccccgctgggccccggcctgaagcagctgctggatgaaaagggccccaaggccgtgagccagtgggtgctggagcagaagaagctgctgctcaccgacaccaccatgcgggacgcccaccagagcctgctggccacccggatgcgcacccgtgacatggtgaagggcgccgacggtgtggcggatatcctgcgggactgcttctcgctggagatgtggggcggcgccaccttcgacgtggcctaccgcttcctccacgagtccccatgggaacggctgcggctgctgcgggagaagatccccaacatccctttccagatgctgctgcgtggctccaatctggtgggctatgccaactatcccgacaatctggtccgcagctttatcaaggaggcggcggagcggggcatcgacgtgttccgtgtgttcgactctctgaactggatccccagcatggaggtggccatggacgaggtgctgaaccagaataagctgctggaggccaccatgtgctacaccggcgacattctggatcccagcaaggataagtacaccctgaaatactatgtggaccttgccaaggagctggagcaccgtggcgcccatatgctggccattaaggatatgtccggcctgctgaagccctacgccgccaagaagctggtgtccaccctgaagcaggagatcggcatccccatccacctgcatacccacgacaccaccggcaatcaggtggcggccctgctgatggccgccgaggccggtgtggatgtggtggatgccgcttgcgccccgctggcgggtcttaccagccagccttcgctggatgcgctggtggccgccctgcagggaacggagcgggacaccgggctggacctgcggcgggtgcaggagctgtccaactactgggcggatgtgcgcctgcggtatgagagcttcgaccacggcctgaaaacctctaccaccgacatctaccgctacgagatccccggcggtcagtacaccaacctgcggccacaagtggagtcgctgggtctgggcgaccgctttgaggaggtcaaggagatgtacaagaccgtcaacgatatgctgggcgacccggtgaaggtgacgccctcctccaaggtggtgggcgatctggccatcttcatggtgcagaacgacctgaccccggagaatatcgtggagcggggcaaggcactggctttcccggattccgtggtgtcctacttcaagggcatgatgggccagcccgcatggggcttcccggaggatctgcagaaggtggtcctgaagggcgaggagcccatcacctgccgtcccggcaagctgctgccgccggtagactttgaccggctggagcaggaggtgcggaagttccgggacgacccggagcgcaaggacctgatctcctacgccatgtaccccaaggtatatgaggacttctgccgccaccgcaaggagtacggctatatcacccgtatgggcagccatgtgttcttcaacggcatggcgctgggcgagaccaacaagatcaacatcgaggacggcaagacactggtcatcaagtatctggggctgggtgaccacaacgatgacggcaccatcaatgtccagttcgagctgaacggaatgcgccgtgaggtggcggtccgtgaccccaatgcctcggaaaagacccgtcaggtggtgcaggccgacgagagcgacccccgtcaggtgggggcctccatccccggcatggtgtccaagctccatgtgcagcccggcgacaccgtggaggagaatcaggtactcatgaccatcgaggctatgaagatggagacagccgttaccgcccgcaccgccggcaaggtccgggagatccgggtgaaggaggggcaggccgtcaaggccaaggagctgctgatgctgctggattga

SEQ ID NO: 2321 - DNA, 1818 bp, Oscillibacter sp.
ttggcagaacgaagaaagatcggtttcggcaccattttgatggtgattttggcggtatgcgtggtggcctatgtggtgtccaccatgcggaccgccggggacatcccctactctgagctgcggcaatactttttagaggagaaggtgcaggagttctccatcagcgacacccggatcacggccaagctgaaggggggcagcaccgttacctccgacctgtacgacttcgacctgttctatcaggatctcaacgagctggtgcagaagcagtatgacagtggtattatcaccgcctataactatcacgcagaccactccaccaactggctgcagctgctgctgccgtatgtgctggcgtttttgggcttcattttgctgatgaatctcatgaaccgcatggccggcggcggagccggggcgcaggacaagctgtcccggtttggagaggccaaggtcagtacgccgggagagaaaaaggtcacgtttcaggatgtggccggggccgacgaggagaaggaggagctgcgggagatcgtggagttcctccgggagccccagaagtatctggacctgggggcgcatatccccaagggcgtgctgctggtaggccctccgggtaccggtaagacactgctggccaaggcggtggccggtgaggcgggagtacagtttctgtccatctccggctcggactttgtggagatgtatgtgggcgtaggcgcctcccgtgtgcgggatctgttccagcaggccaagaagagcgccccggccatcatcttcatcgacgagatcgacgccgtgggccgccagcgtggcagcggcctgggcggcggacacgacgagcgggagcagaccctgaaccagctgctggtggaaatggacggcttcggctccaacgagggggtggtggtgctggctgccaccaaccgtgtggatattctggacccggcgttgctgcgtccgggacggttcgaccggcaggtctatgtggggctgccggatatcaagggccgggaggagatcttgcaggtacacgccaagaacaagcctctggcggaggacgtggatctgaagcagatcgcccgtggcaccgcaggctttaccggcgccgatctggagaacctcctcaacgaggcggccctgctggcgggacggcgcagcgagtccttcatcaccatgaaggatctgcaggagtccatcatcaaggtcatcgccgggccggagaagcacagccgggtcatcccggagagggagcggcggctgacagcctatcacgaggcgggacacgccgtggtgatgcacgcactgcccgatctggacccggtgcatcagatcaccatcgttccccggggcgaggcgggcggcatgaccatctatctgccggacgaggatcggtcgtacctctcccgcagctatatgctggaccgcatcgccgggctgctgggcggccgggcggcggagcagctggtgctgggggatatctccaccggggcctccaacgacatcagccgtgccacgcagctggcccggaagatggtgggcacctacggaatgtcggagcagctgggcaacgtggccttcgacgccggacacgacgaggtgttcatcggcaagtccatggcccagacccggccctattccgagaaaacggcggcggagatggacggcgagatccgccgcatcatggacgacgcctacgcccgctgcaccgccattctggagcagtaccggccccagctggtggaggtggcggagtatctgctggccaacgagaccatgacggcagaggagttcgagaaggtattccggacggagtga

SEQ ID NO: 2322 - DNA, 2244 bp, Oscillibacter sp.
atggcagaaaacagaaggaaaagtgaaaacatccggcgggccaaccgggtcatccagacccgtacctttgtgctgatgctggtgctgggcgtggcagtgtttctggtgctggccctgaagctgtatcagctgcagatcaagcagcacgactactaccagagcaaggcgctggatcagcagacccgcagcactgtggtgacggcctcacgaggcaccatctacgaccgcaacggcaacgagttggcggtatcggccacggcggagacggtgttcctctctcccaaggaactggcggaggagctggaaaagcctgagaccaagtggaccaaggagagtctctccgccggcctgagtcagctgctgggtgtgacgcaggagagtattctggagcagatggagcgcacctactcccagtatgaggtggtgaagctccgggtggacgaggacacggccaacgccgtccgggagttcctcaatgacaacgaggtccacggcgtgtatctggagaccgatgccaagcgctactatccctatggctcgctggcggcccacgtcatcggcttcgtgggaacggacaacaacggcctctatgggctggaggcccagtatgaggaggagctgcagggccagacgggcctggtggtcagcgccaaggacaacggcggcaacgccctgccctatgaatacgagcagtactacgcctcccacaacggcgacgatctggtgctgacgctggataccaacgtccagtactatctggagaaatacgtcaaggagatggcggaccagttcgaggctgccaacggcgccaccggcatcgtcatggacgtcaagaccggcggcgtgctgggcatggtgtcctaccccaactacgatctgaacaactactccgaggtgtcggacgcccgcctgaaggcggccatcgaggacggcagcgcctcactggcggatcagcagctgcgccagtggcgcaacaaggccctcaatgacacctatgagcccggctccaccttcaagatcctgacgctgtcggcagcgctggaggagggcgtggtggatatgagctccacctttgaatgctccggctccatcaccgtcatgggccagaccatccactgcagcaataccagcggccacgggcatcagaccctgaaggaggccaccggtaactcctgtaaccccgccttcatcaactgtggcctggggttgggaacggataccttctacgagtatatgcgctccttcggcctgctggatggctccggcatcgatctggccggtgaggccaccggcatcttcatggcccagagcgacttctcccagctggatctggcctgctacgccttcggccagaacttcaacgtgacccccatctccctcatcgccgcacaggccgcctgcatcaacggcggctacctgtaccagccccatgtggtggaacagatccgggacagcagcggcgctgtggtgtatcagcacgacaacacccccctgcgtcaggtagtcagccagcagacctctgccatggcccgtgagtgcctggagtatgtggtctccgatggcggcggccgcaacggacaggtaaagggctaccgcatcggcggcaagaccggtacggcggataagggcaagaccggcgacgtggtggtgtccttcgtggcctttgccccggcggacgatccacagatcatcatgctcatcgccatggactcccccgcccgtgacaccggcacctacccctccggcggcgccatggtggctccggtggccagcaagatcatggcggagatcctcccctatctgggcatcgagcccacctacaccgctgaggagctcatgggtgccgacaccaccgtcccctatgtggtgggcatgacccgtgaggaagcccagcagcgggtgaaggatcgtggcttcggctgccagatcgtcggtgacggcgataccatcaccgaccagacccctgccggcggggccattatccccggcaacgccacggtgatcctctatgccggggcggagaaagccacagagctgtgtactgtccccaacctgctgggccggacggcgtcggaggccaattcgctggccagcaacgccggactgatcctgcgcttcaccggtgccaccaacagcacctccggcagcatcgtggtgctgaatcaggatgtagaggccggtgctcaggtggagcccggcaccgtcatcagcgtgcagctgggggataccagcctcaacgactga

SEQ ID NO: 2323 - DNA, 4734 bp, Oscillibacter sp.
atgaacagaaaacgcatccgacagatgaacacggccctgctgcggcggctcaccggccgccctacggcggagtatttcagcggccagcccctgctggagcggctggagagcgagaactacatccagcgctttgcgcccctttacgacggcacccggctgcgctgcggcgacgtgctggagctgtgccgcccggaactggcggagctttccggcggggagccggagggcgggtggctgcgctttgcctatgactttgcccggcggcagctgttcccggagaaggaggcccctgcggcctatgacgccggggcggtgtttttcctgtctcttttgcaggtgctttttgccgccgaacgggagaagctgccctttgacccggcgtgggatctcgccttcctgtcggaggcggaggcggcagagtgcgcctgcggcaccagctatcgacagatgctgcggcagtggaagcgggagtacgtctatgagatgatgcggctggggctggaggtgacgccctaccgcacgctggagcacatcgccggggtgcatcacatcgcattgacctgcggccgggcgctgcggcgcagcggcacggcggtggatctggcgctggtatccggcagcgccgccggacacgacatcggcaagttcggctgccatccgggggagcgggtagcgtatctgcactactactacacggatctgtggttccgccgccaccggctgacggacatcggccatgtggccgccaaccactcggtgtgggatctggagccggagtatctgtcggcggaggcgctgctgctgatctatgcggacttccgggtgaagcagacccacgacccggaggggcatgagatcacgcacatctcgtcgctggcggaggcctttgacgtgattttgaacaagttagacgacgtggacggggagaagcgccgccgctacaccagagtttatgcccgcttgcaggacttcgaggcgtatatgatccgccggggggtggatgtgaccatgcagggggcggacacgcagccgctgccggagcaggcggtggccctgatggaggatgcgggggtgctggagtccctgaccatgcagtgtgtggcccacaatatggagctgatggaccggcttaccgggcagcggagctttgcctccctgctggagcaggcccgtggcgagaccaactggcggcggctgcgggcttatctgggggtgttcgagtcctactccctgtatctgcacattccacagaaggtgcagacgctggcctttctctatgagctgctgatgcaccgtgagggggacatccgccgtcaggcagcggccctcatgggagagatcatcgcagggttccacgcaggctacgccaaggagcgtccggcggacagccgtcccgacctgcggacggtgacggatctggatcagtggaggctgtatctggagaagatcatctatccggatcataagctgatgccccagcaccgggggtggatccggttcaccctgaaattctgcgtgaagtccctgctctcccgctgccccggacgggaggagcggtttctggcgccggtgctggcgtatctgcggcggccggagcagctggacgatcaggtggcgctgcagctgctggatgcggcggcggacctgccgctggagctgtgtacccggccccagctgaacgcactgctccgtgcggcggaggtgctgtccgggcgggagagcctgacggtgcaggcggcggccatgctgctgctggatcacgtccacacctccatgccccggcagaggaggcccctgaaaattttgcaggagatggactgcggcaatatgtcgctggccctgctgcgggaggatatctgcgccggggggctgcatttgcaggaggcgcaggtgtcggatatttttctggataacctcaagaccgccacgccgtggatcatcaagcaggtgaacctgcggctgctgacggacgatgcacggaacgaccacggctcggcccttcacatcgccacgcatctttctaacctcatcaaggtcagcgaccgggtcacggtgcgccacggcgcaggatcggcgctgatggagatcgctccccggctgacggtggatcagcgcaatgaggtctccgtggagctgtgccgggggctggagctggggcagcaggagttcaccaagtacatccccgattatctggggcggtttgccctgtggctgccgccggagcagctggacgagtgtctggcggatctgggggtgaccctcagcgcctccagcagccgcatcgtggccccggtgctggacaccgtgggtgtcatctatgaggagtatgacgtctatcatcagcggttcccggaggaagcggaggaggcgtgcctacgtcgccgggaccggctgctggggatgctgatgcggggactggcgggcatcgacggagagacccggcaggaggccatgctggtgctgggacaacgggtgttcggctcggcacagctcagcaacggcgagaagagccgggccttccccctgacggcacggaagctgctgaccacctgccgccaggaggacggggatgcactgtccttctactatcgggcctccatgctggggaggctgtaccgctttttgacggcccagcggctgcgaggcggcttcacctttgaagcgccacggcccatcgcctttttccccggtaccttcgatcccttcaccctgtcccacaaggccatcgtccgcaccatccgggatcggggcttcgaggtgctgctggccatcgatgagttctcgtggtccaagcgcacccagccctaccgcatccggcggcgcattgccgccatgtcggtggcggacgagttccatgtgcagatcttcccggaggacttcccggtgaacatcgccaacccggagaacctccaccggctgcggcaggcattccccgggcggaaggtgtccatcgccgtgggaagtgacgtggtggcccacgcctcctcctatcgcaagcccgtggagccggactccatccatacctttgaccacatcatcttccgtcggcccggtcaggaggccgggggcggctacggcggcatttacggcaaggtactggagctgacgctgccggagccgctggaggagatcagctccacccgcatccgggaggcggtggacgccaaccgggacatcagcaatctggtggacccggcggtgcaggagttcatctatcggagggggctgtatctgcgggagccgcaggacaagcccctgctgcggacggaggatctggattttaccgactatccccggccggatgcgtccatggaggccatgctggagggaatctgccccgctgccatggtggagaagctgtggcagtgcggcgacagtctcctgctgctgcgccacggaatgcaggggcaggtgctgggagccgtcagctaccggcagctggagtcccgtgagctgtatgaccggctggggagtctggagctctccggctatgtgcggcagaaggccgggggtcgggcgctgctcatcagcggactgtgggtgccggacggcagccagcagcgggaactggggcagctgctgctgacggaggtgtttaccatggcactggggcgggagtatccctgcgccctgtacgatccgctgcccggtgcagagcacagctatgtgctgaatttgctgcggcggcagggctttgtcccggctccggtgtcggggcggccggtgctggaggtggatatgcgctgccccatcgtgctgagccacaacgtggacacctccatcaaggctccgctggcctccatgccccgtgtgacggcggcggtggccgtcgcccatcggcgtttgcaggaggcgctgacggagctgcagccggggtcgctggtgctgagcctgtcggcggggatcatctatcaccggctgctccagcgcatcaccgcacgcaacggcgtacccgccgaaccggtgacgccccggcggcagggaccggatatctgcgtcccctatggaaagctgctgcggggcgtggcggtgcctaacaccgtcactaagaccctgcgtaccgacaaggtatacgaggcggatctgtcggactatgccatcgaggcctacccggagtattcgccgctgccggatcaggtgcggaccatccgggcctttgaccggcccgtcattctggtggatgatctgctccacgacggcaagcggctgcggagcctgtcgccgctgctgaaggagacggggacgcaggtggatctggtgctggtgggctatctaactggcatgggccgggatctgatggaggaactggggtatccggtggagagcatctactatctgcccaatctgcggatgcggttcgtggagtccaccctgtatcccttcatcggcggggacaccgtgcggcggcgagagcggcccacggaggggcttcagccctccgtcaaccgcattttgccctacgcctccccggaatttgcccccattgccccggatgtggcgtggcggctgagcctgtgctgtctggaaaacgcaagggacatcctgctggcgctggaggcggagtatcgcttcctttatgcccggaacctgacgctgaaccgcctcagcgaggcggtgatcctgcccctgtatccggataagggcgggtgcatgacctatgatctgagccgtaccgcctccacctatctggaggaggacatcgagctgctgaagcgggtgcgtcccgcagaataa

SEQ ID NO: 2324 - DNA, 2418 bp, Oscillibacter sp.
atgacttatacgaaggaaacattgcaggaggccatcgtgcagaaactgcggctgaactacggctgcacggagaagcaggccaccgacggagagatcatgaaggcctgcgctctggtgctgcgggatatcatggccgagcggggggtgcgtacccgtgaggaggtggacagtcaggagaagcggaaggtccactatatgtccatggagtttctcatgggacgcagcctgatgaagaacgcctacaatctggagctgctggagccgctgacaggggccgtggaggcactgggcttcaaggcggcggacatcttcgacatggagccggatgccggtctcggcaacggcggtctgggccgtctggctgcctgctatctggacagcatgaccacgctggagatccccgccaccggctactccatctgctacgagctgggtatcttcaagcagaagatcgtggacggccagcaggtggagctgcccgacgactggaagaatctgggcgatgcgtggctcatgcccaagccgcaggagacggaggaggtccacttcggcggcaaggtcctcacccggtgggacaacggccacctgatggtggtgcatgaggactatacccgtgtgctggcggtgccgtgcgacatggagatcgccgggtacgacacccagcaggtgaacaccctgcggctgtgggacgccaagagtcccaagcccatcgacatgaagctgttcagcgaggggcagtacctgcgggccggggaggagcgggccatggcggacgtcatctccaaggtgctgtatccggaggacaaccactatgagggcaagtccctgcggttgaagcagcagtatttcttcgtttcggccaccatgcagtccatcacacggcagcacatccagacctacggcaccctgaaaaacttccacgagaagaacgtcatccagatcaacgacacccatccggcgctggtgatcccggagctgatgcgtattctggtggacgatgcgggcctttcctgggacgaggcgtggcacattaccacccgctccgtggcctacaccaaccacacggtactggcggaggcgctggagtgctggccccagcagctgttcgagacgctgctgccccgtgtgtggcagatcctgcaggagatcgcccgccgctggcaggagaaggtggagagcttctatcacgaccccgaaaagaccgccaagatggcggtcatctgggacggcgtggtgcggatggccaacctctgcatcgccggcggtatggccatcaacggcgtgtccgctctgcactcggatatcctgcgccatgatgtgttccgggacgcctgccgaatggagccggagaagttcaagaacgtcaccaacggcgtggatcatcgccgctggctcagccagatcaaccccggtctggacgggttgatccgggagctcatcggggatggttatctgacccatgcgggccatttgcaggaactggacccctatgctgaggatggggcggtgctggcccggctggaggagatcaagcgctgcaacaaggagacctttgcccggtgggctcgccgacagcaaggggtgcagctgaacacggacgctatctttaacgtgcaggtgaagcggcttcacgagtataagcggcagctgctgaacgtactgcacatcatcgccctgtaccagcagctgcaggacgacccggacatggacttcccgccccagaccttcctctttggcgccaaggccgctcccggctatgccgtagccaagcgcatcatccgtctcatcaactctctggcggatcaggtgaacaacgaccccatctgcaaggggaagctgcaggtggtatttctggagaattaccgggtctccatggcggagatgctgatgcccgccagcgaggtgagtcagcagatctccaccgccggcaaggaggccagcggcaccggcaacatgaagttcatgatgaacggcgcactgaccatcggcacgctggacggtgccaacgtggagatgcacgaggtgctgggggacgagaatatgttcctctttggcctgacggcggaggaggcctcccacatgagccggggctacgacccgtatctgctgtatacacgtgacccggtgctgcgccgggtgctggatcagctgaaggccgggttccgggacggcgtcagctatgaggacttgtaccagcggctgctgttcggcgtggactgcccggcggatcagtatctgctgctggcggacttcgcctcctactgcgccgcctcccagcgggtgacggacacctaccgggatcgggagaagtggaaccgcatgagcctgcacaacatcgcccgcagcgggatcttctccgcagaccggtcggtggcggactatgccgatatcatctggcacgtaccgtataagaagtaa

SEQ ID NO: 2325 - DNA, 2241 bp, Oscillibacter sp.
atggcaaagaagaaaacagaagagaaaaccgtccatcgtcccgccgatcccaatgtcatggggctgcgggggacggtggtggagcagcccatcacccgcacactggacgagaactatatgccctacgccatgagcgtcatcgtctcccgggccattccggagatcgacggcttcaagccctcccaccggaagctgctgtacaccatgtataagatggggctgctcaccggcgggcgcaccaagtccgccaacatcgtgggccagaccatgcgcctcaacccccacggcgatcaggccatctacgagaccatggtgcgtctggccaagggaaacgagtcgctgctgcacccctttgtggacagcaagggcaacttcggcaaggtctattcccgtgacatggcctatgccgccagccgctacaccgaggcaaagctggcccccatctgtgccgagctgttccgggatctggactgtgacgccgtggacttcgtggacaactacgacaacaccaccaaggagcctaccctgttgcccaccacctatcccaacgtgctggtgtcggccaatcagggcatcgccgtgggcatggcctcgcagatctgcggcttcaatctggcggaggtgtgcgacaccaccatcgccctgctgaaaaatcccgaccacgacatcgcctccaccctgctggcgccggattttcccaccggcgggcagctggtgtgtgacccggcggagctggcggaaatttaccgcaccggccggggcggcgtcaaggtccgggcccgctggcgctatgacaagaaggagaatctcatcgagatcttcgagatcccctactccacctccatcgaggtgatcctggacaaggtggcggagctggtgaaggccggcaaggtcaaggagatcagcgatatgcgggacgagtcggacctcagcggcctgaagctcaccatcgacctcaagcggggggtggacccggagaagctgatgcagaagctgtataagctgacgcctttgcaggacaccttcagctgcaacttcaacatcctcatcgccgggatgccccgtgtgctgggagtcaaggccctgctggaggagtggatcgcatggcgcacggagtgtgtgcggcggcgggtgtacttcatcctctcccgcaagaaggagaagctgcatctgctgctgggtctgaagcgcatcctgctggacatcgacaaggccatcgccatcatccgggagacggaggaggaggccgaggtcatccccaacctgatgatcggcttcggcatcgacgagaagcaggcggaatacgtggcggagatcaagctccgcaacatcaacaaggagtacatcctcaagcgggtgcaggagacggagagcttgcagggagagatccaggatctggaggacaccctgcaaaagcccgcccgcatccgcaggatcatggtggaggagctgacgcaggtacgcaagaagtacgcccagccccggaaaaccgagatcatttacagccacgaggtggaggagtatcgggaggaggagcaggtggaggactatcctgtcaccgtgttcctgtcccgtgaggggtatttcaagaagatcacgccccagtccctgcggatgagcggcgagcagaagtacaaggagggcgacggccccggccagcaggcggaggccaccaatgccgccgaggtcatgttcttcaccgaccggtgtcaggtctacaagacccgcctcagcgagttcggggacagcaaggcctcggtgctgggagactatctgccggcgaagctgggcatggacgagggcgagagcgtggtatatatggtgctgccgggggattacagcgggcatctgctgtttttctttgaaaacggcaagatcgcccgtgtggagatgaaggcctacgccaccgtctccaaccgccgcaagctcaccggggcctactccgacaagagcaggctggtggccattctgccgctggcggaggatcgggagctggcgctgctgtccacggagcccagggcgctgatcttccacacgtccctgctgctgcccaaggccacccgctccacgcagggcgtggcggtcatgaccctgaagcccaaataccagctgcaacgagtctgcacgccggaggagtccggtatcgtgaatctcccccgctatcgggcccgcagcatccccggtaccggcgctctcctgcggccggaggaccggggcgaggagcagctgaccctgttgtaa

SEQ ID NO: 2326 - DNA, 2382 bp, Oscillibacter sp.
atgactgatctgtttgaaaaatccatccgcacgctggagcttccggcggtgctggaaaagctggcggccaaggcggtcagcgacgccgccaaggagcggtgcctgcgcctgactcccgccacggacacgcaggaggtgctgcatctgctggatgagaccgacgccgccaaggagcggctgggtctccacggcagcccctccttctccggggtcaaggatgtatccgccgccctgacccgtgccgaccacggcggtatgctgaacacccgtgaactgctggatgtggcaggcgtactgaccgccagccgccgggtcagcgaatacgacgcccagcggcagggggaggccacggtgctggaccggctgttctcctctctgcacaccaaccgctatctggaggataagatacgctccgccattctggacgaggagaccattgccgacaccgccagcagcgagctggcggatatccgccggaaaatgcggctggcggccaccaagggccggcagatcctgcagcgcatcatctcctccccctcctatgccaaggtcctgcaggaggccctcatcacccagcgggacggccgcttcgtggtgccggtgaaggccgagtgcaagggcagtctgccgggtctggtccacgacatctcctcctccggtgccacgctgttcgtggagcctatgggcgtggtgcaggccaacaacgaactcaaggagctggaggcccgtgagcagaaggagatcgaccgtatcctgcgccagctctctgctgagtgtgccggccagatggagaacatcctctgggactacgacattctggtgcagctggatgtgatctttgcacgggcgcagctgagctatcagctcaacgccagccgcccggaggtgcgccgccggggcggcatcaccctgcgccgggcccggcatcctctgctggatcaggccaaggcggtaccgatcaccgtggagctgggtgagcagttcgacaccctggtcatcaccggccccaacaccggcggcaaaaccgtgaccctgaaaaccattggtctgctgagcctgatggcccagtgcggcctgcacatccccgccgacggcggcagcgccgtgcgggtgttccgccgggtgctggcggacgtaggagacgagcagagcatcgagcagagcctgtctaccttctcggcccatatgtccaacattgtccagatcctgaaggaggtggacgaccacagtctgctgctgttcgacgagctgggcgccggcacagacccggtggagggtgcggctctggccatcgccatcattcaggaggcccggaatcagggggctctcatcgccgccaccacccactatgccgagctgaaaaccttcgccatgaccacggcgggggtggagaacgccagctgcgagttcgacgtacagaccctgcggcccacctaccggctcctcatcggcatccccggtaagtccaacgccttcgccatctcccggcggctggggctggatgagtccgtcattcaggcggcacaggcccagatggacagcgactccgttcgcttcgaggacgtgctgacccagctggaggagaagcgccagcggctggagaaggcccagaacgaggccgaccgactgtggcggcagcgggaggaggacgcccggaaggcccgaaccttccgggagcagatggaaaagggcaaggaaagcgcacgggccaagggagaggctgaggccaagcgcatcgtccggcaggcccagcagcaggcggaggagatcttcgcccagctggatcagctgcggaaggagcagcagaagcaggccaacgtgcaggccctcaacgacgccaaggccgccgtgcgccaccatctgaaaacggcggaggagcagctgcacctgcgggacgaggagcaggagcctgcctatacgccgccccggcccatcgccgtggacgatcaggtggagctgcccggcgtgaagatggccgccacggtgctggccgtcaacggcgacggcaccctgctgctgcaggcgggccgcatgaagatgaccgtcaaggctcagcaggtgcgcctgctggatggcgctcccaagaagtccaagcccgcacccagtccctccgccgccaccctgaacaccgtgtcccgtgcctcctcggagctggatatccggggctatgagacgctggaggccgagagcgtggtggaaaactatctggacagtgccgtcatggctaagctgggcaccgtcaccatcatccacggaaagggtaccggcgccctgcgaaaggccgtccacgagatcctcaagcgtaacaaggccgtcaaaagcttccggctgggccgctacggcgagggtgaggccggtgtcaccgtggtggagctgaaataa

SEQ ID NO: 2327 - DNA, 2082 bp, Oscillibacter sp.
atgaaatcctatctggccaaatcccggctggtgccgctggtattgatcttcgggatgatcctgctgatcttctgcggcgtgctatacaatactcagatcctcaacggatcggactataaggctcgctcgctggccagcaacgccaccgctcagacggtggaggcctcccgcggcatcgtcaccgaccgcaacggcaaggtgctgatctccaaccggctgacctatacgctggtgttttccgacgaggaatttgaaggcgacacggactgcaacgacgccatcttccggctgctggagctgtgccgcagcaacaacgtcaaatggacggacaccctgccggtgagcaaggagccgccctttacctacaccacccccaccgacgagggcgccttccggaaatatctggaatcggaggatctgcccgccatcacggtgggtaccctgcggcccactcaggaggccccgctgttcatggcccaactgcgcaagctctacggcgtggcggacagctactccgacaccgacgcacgggctatcatcggtgtgcgctaccagctggccctgcgggacatcgcagggggtacctacaccttcgccagcgatgtgtcggtggagctcatcaatcaggtggtggacggccgctatgccggtgtcaccaccggcacggcctcggcccgtgtgtatgacactacctacgccgcccatgtgctggggcggctcagtcccatctatcaggaggactgggtgggcgatccggacaacggcatcgtgggataccgggacaaggggtattccatggacgctctggtgggcgagagcggcgtggagaaggccttcgaggagtatctccacggcgagaacggcaccaaactcattaccaccacctccgatggccagatcaccggtgagttctacaccaaggaacccaagcccggcaacaccgtggctctgacgctggacatcgacctgcaggaggacgtggaaaaagccctcagcaagaccatcgatgacatgaccgaggcggacggcatccgccgtggcggcgccgccgtggtggtgggcgtgggcagcggcgaggtgctggcgctggcctcctaccccacctatgacatcagcaagtgggatgaaatttatgacacgctggcctccgacgacaagggagctcccctgttcaaccgggccattggcggcacctacgcccccggctccaccttcaagccctgcacggcggtggcggcgctggaatccggtgtcatcaccccctctaccaccattctggaccggggcatctacgactactactcctccccccagccccggtgctggatctacagttcctacggctccacccatgggcgggtgaacgtgtcggaggccatcaccgtgtcctgcaactacttcttctatgaggtgggccgtctgacgggcattaagacgctggacgactatgccacccagttcggtctggggcagtacaccggcatcgagatcggcggccccaacagcgccgaggccaagggcgctctggcctccccggagtacgccgaggccaacgatctggagtggtccgacggtcagaccctgaccgccgccatcggccagagctataacctgtttacgccgttgcagctggccaactacatcgccacgctggtaggcaacggtgagcactatgcggcccacctgctgaaaaacgtcaagacctataacaactccgccgtggtctatgcctacgacaaggaccccgtcaacgtggtggagatgcaggacagcacggtggaggccatcaagaccggtatgcatgatctgaccaccgggagcctgtccacctacttttccaagtgcgtggtgtccgccggtgccaagaccggtacggcggagaccggtgtcaccaatgccaacaacggtaccttcgtgtgcttcgccccctacgacgatccccagatcgccgtggcggtggtcatcgagaagggcggcgccggtgcggctctggcggagacggcggtggatatcctcaacgcctacttcagccgggaggagatcggcaccgccatcatcggcgaaaatactctgttgaactga

SEQ ID NO: 2328 - DNA, 3723 bp, Oscillibacter sp.
atgagttacgcaacatttgacgccattaaaatcggaatcgcttctccggaaatgatccgtgagtggtcctacggcgaggtgaagaagccggagaccatcaactaccgcaccctgaagccggagcgggacggcctgttctgtgagcgcatcttcgggcccaccaaggactgggagtgccactgcggcaagtataagaagatccgctataagggcaagatctgcgaccgctgcggcgtggaggtcacacgggccaaggtgcgccgtgagcgcatgggccatatcgagctggccacccccgtcagccatatctggtacttcaagggtatcccctcccggatgggcctgctgctggatatcagcccccgcattctggagaaggtgctgtactttgccgcctatatcgtcaccgatcccggcgagacgccgctggtgaagaaccagatcctctccgagaaggaataccgggatatgcgggagaagtatgaggatgactttgatgccggtatgggcgccgaggccgtgaagaagcttttgcagcaggtggatctggagggcctgagccagcagctccacgccgagctgaaaaccgtctccggccagaagaaggcccgtgtggtgaagcggctggaggtggtggatgccttccgcctgtccggcaacaagccggagtggatggtcatcgacgtgctgccggtgatccccccggagctgcgccccatggtgcagctggacggcggccggttcgctacctctgacctcaacgacctgtatcgcagggtcatcaaccgcaataaccgcctcaagcgcctgatggagctcaacgcccccgacatcatcgtccgcaacgaaaagcggatgctgcaggaggccgtggatgccctcatcgacaacggtcgccgtggccgtcccgtcaccggcgccaataaccgtgccctcaagtccctgagcgatatgctcaagggcaagcagggccgcttccgccagaacctgctgggcaagcgtgtggattactccggacgaagcgtgatcgtggtgggccctgaactgaagatctaccagtgcggcgtacccaaggagatggccgtggagctgttccgccccttcatcatgaagaagctggtggaggacggctccgccaacaacatcaagtccgccaagaagatggtggataagggccgcaccgaggtgtgggacgctctggacgagatcatcaaggatcaccccgtgatgctcaaccgtgcgcctacgctgcaccgtctgggcattcaggccttcgagccggtgctggtggagggccgtgccctgaagctgcaccccctgaactgcaccgccttcaacgccgacttcgacggcgaccagatggcgatccacgtccccctgtccgccgaggctcaggccgaggctcgtctgctgatgctgtcggccaacaacctgctgcgtccgcaggacggcggccccgtcaccgtgcctacgcaggatatggtgctgggctcctactacctgaccttcgagcggtttgaaaacggtatgtgccagatgaccaacgacgagttctggccccagggcatcgactttgcgctggccggtaagaactacgacgagctcaccgacgaggagaaggagcagaaccgcctcaacgtctaccgggacgaggacgaggtgctgatggcctacaacgagcacatcatcggcatccaccagcccgtgtgggtgcgggtggagaaggagctgggcggcgagacgctgcgccatgtggtgcgggcgactcccggccggatcatcttcaaccgcaacatcccccaggatctgggctttgtcaagcgcttcaacgaggacggtacgccctccgataagttctttgactatgagatcaccgagacctgcggcaagaagctgctgggcaagatcgtggaccgcaccatcaagcagtatggctttaccatcgccgccgaggtgctggacaacatcaaggccaccggctataagtactccacccgtggctccatcaccatctccattgcggatatgacggtacccgagaagaagtattccctcattgccgagacggagcagcgagtggtggatatcgaggaccagtacaacatgggcttcatcaccgacgaggagcgctacaagctggtggtgcgtgagtgggaaaagaccaccaacgacgttaccgacgccctgaccgccagtctggataagtataatcccatcttcatgatggctgactccggcgcccgtggctccatgaagcagatccgtcagctgaccggtatgcgtggcctgatggccaacaccgccggtaagaccatcgagatccccatcaaggcaaacttccgtgagggtatgtccgtgctggactacttcacctcctcccgtggcgcccgtaagggtctggccgatacggctctgcgtaccgcagactccggttatctgacccgccgcatggtggacgtgtgccaggatgtcattatccgtgaggatgactgcggcgtggacaagggcatcgtggtgtccgagatcagcgagaacggccaggtcatcgagaagttctccgagcgtgtcaagggccgcttcccggtgcgggacatcctgaagcccggcaccgacgaggtgctgatctccaaggatcacatgatgaccgaggacgacgccgccctgctggagaagttcgatatccactccgccgagatccgcaccgtgctgacctgcaaggcccacagcggtatctgcgccaagtgctacggcatgaacttggccacctccaagccggtgggacccggcgaggccgtcggcatcatcgccgcacagtccatcggtgagcccggtacccagctgaccatgcgtaccttccataccggcggcgtggccggcggcgacatcacccagggtcttccccgagtggaggagctgttcgaggcccgcaagcccaagaagatggccaccctgtcggagatcgccggtaaggtccgcttcgaggatgccaccaagggcagcctgctgaacatcatcgtcaccgccgacgacggcgatacccggacctactccatgccccacaccggtctgcaggtgcgggacggcgaggtcatcgagaagggccgccagctgcaggacggcgcactgaatccccacgatgtgctgcggatccgtggcgcttcggcggtgcataactacctcattcaggaggtcctgaaggtgtaccgtcagcagggcgtggacatcaacgataagcacatcgaggtcattgtccgccagatgatgcgcaaggtccgtgtggaggacgccaatgacgccaccggcctgctgtccggcgccatggccgacgtgctggaggtggaggacgagaacgccaaggtgcgggcccgtatcgccgccggtgaggtcaacgccgagaccggtgagccgctgcaggaggccacctatacccaactgctgatgggtatcaccaaggcatctctggccaccgattccttcctgtccgctgcctccttccaggagactaccaaggttctgaccgaggccgccatcaagggcaaggtggaccatctggtgggcctgaaggagaacgtcatcatcggtaagctgatccccgccggcgccggcctgaacgcctaccgccatttcgctgaggagctggtgcctgaggagggcgctgccgacagcgtatccatggaggagaacatgtctgcggaagaacctgccgacgagacggaggagtaa

SEQ ID NO: 2329 - DNA, 2514 bp, Oscillibacter sp.
atgttttacggatacccgtcccttggggcggcggacccgcaggaggatactatggaacgaaaaaagctgctgatcgcagacgattcggagatgaaccgggccattctggccaatatgctggagcaggatttcgagatcatggaggtctccgacggcaaggaggctctcgccgcattgcagatctatcgcaaggacctgtcggctctgctgctggacatcgttatgccggagatggacgggtttcaggtgctggaggagatgaagcagcgccagtggctggaggatgtgccgacggtgatgatctccgccgagacgggcagcggctacatcgaccgggcctttgagctgggggcggtggactacatcaaccgccccttctccgccacggtggtgcggcagcgcatcatcaacaccatcctgctccacacccggaggcaggagatgatggacatcctcaccagccaggtctaccagcaggagaagagcagcgaggtgatgctgtccatcctgaacttcgccgtggaataccgcaacggcgagggcggcggccatatgtccggcgtggagtacctgacagggcttctgctgcggcggctgatggcggtgacggcgcaatactccctgaccccggaggatgtgaacctcatctgcacagcgtcgggcctgcacgatatcgggaagctgctggtgccggaggatatcctgcaaaagcccggcaagctgacggacgaggagttctccatcatcaagacccacaccaagctgggggcgcagatcctgtcggagctgcccatgcaccgcaacgagaagctggtgaagtacgccattgagatctgccggtggcaccatgagcgctggaacggcgaggggtatcccgacggactggccggggatcacatccccatcgccgcacaggtggtgtcgctggcggacgcctatgatgccctgaccagcaagcgcagctacaagcaggctttttcccacgagaaggccgttgaaatgatccacaacggcgagtgcggcagctacaatcccctgctgctgcgctgtctggacgacgtgtccgacactgccaagcagggcatgaaggacgccgggcagacggtggcgcctctgcggcgggtggtggaggagctgtataaagggcaggatctggccgccgcacggatgacccagcagctggaggatgcctacgccaagcaggacttctttacctccctcagcgatgagctgtggttcgactataccgcccagccctcctccctgcacctgtcccgtgggctggcggagcagacgggtttgccgtcggtgatgctggagccgctgcaaagcccgacgttacagatgtatctgggcaaggagctgacagagggccttaaacggcagttggagggcctgacgctggaggagacacggctggatctgaccacgaaattgcggctgcgggggcgactgcgccggtgtcagctatcggtgcagatcacgtggtctgcccggaagcagaggcgctgcgccgctctgctggggaaagtcaccgacattgaggaccgcagccagtgcatcgagcagctgcgggcggagatacagcacgccgaaacgcctcagaccctgtcgcagcctcccctgccgatatcggccagcaacggcgtgatccgcatcactcaccatcagctgtcccatctgttccacacctatcagccactgttcgagacggtgcggctggtggatcccggcatctgtatgcaggtgacaccggggccggacggacccagcgtccgggagaacgactactgctatgccatgtggtgcaaaaagcaacgctgtgagcggtgtatctcgcaggatgccgtgcgtacccggcagatacaaaacaaggtggagtccatcggcaaggatatgtactacatcatcgccgtctgcatcgaggtggacgggaccccgtattcactggagtgcataaatcccatccggctggacaatggccccggcggacaggaggagcacctgctgaaccaactgctgatgcggaaccggcaggtatacatggactcggccacccaagtctttaatcggcgctactatgacgagcagctgcgggaactcagcggcgaatatgctgtgcctatgatcgacgtggacaacttcaagcaggtcaatgaccgcttcggccacgccgccggagatgccgccctgtatcgcgtggcccagacgatgcgctccctgctgcggagcagcgatgcactggtgcgctacggcggcgacgaattttttctgctgtttcagagtctgccccgtgccgtgctgcaccagaagctggaggttctgtgctgcgccgtgcgggagctggagctgccggaatttcccgagctgcacctgaccatcagcgtgggcggcgtccacgggcaggggcgggtgcgggacctgatcatacaggcggataccgccctttatgaagccaaaattaaaaaggactgcgtggtggtctatgaggaggatgccaatgaagctgaatga

SEQ ID NO: 2330 - DNA, 2457 bp, Oscillibacter sp.
atgatggaaaataaattcacccctcgtgcagaggaggctctgcgtctggcccaggaggccgctgaggatatgggacatggctatgtgggctccgagcacctgctgctgggcctgctgcgggaagaggagggcattgcccaccgtgtgctggaggaaaacggactcactgacgagttggtctgcgacatcctgcaccgcagcgtaggcaccggcgtctccggcgccgcaccctctcaggggctgacgccccgtgccaagagcgccgtggagttggccgtttccgaggccgcccgcaccggcgccggctacatcggcaccgagcatctgctgatggggctgctgcgggagggcaacaacatggccctgcgcatcctgcgcaccgtgggcatcgaccccaagaagctgtacagcgccgtggtgaagaagctcaatgaggcgccccgcaccgccgccgtgtccggcagcgcttccgctcccgcacaggagggcggcaagaagggcgctctggaggagtatacccgtgacctgacggaggcggcccgcagcggcaagctggaccccgtcatcggccgggagaaggagattcagcgggtcatccagatcctgtcccgccgcaccaagaataaccccgtgctcatcggtgagcccggcgtaggcaagaccgccatcgcagagggcctggcccagcgcatcgccgctgccgacgtgccggaggagctgctggacaagcgggtcctgtcgctggatctgtccggcatggtggccggcaccaagtaccggggtgagtttgaagagcgtatcaagaacaccatcgacgaggtgaagaaggccggcaacgtcatccttttcatcgacgagctgcacaccatcgtgggcgccggctccgccgagggtgccgtggacgccgccaacattctcaagcccgctttgtcccgcggcgagatccgtgtggtgggtgccaccaccctcaacgagtaccgcaagtacatcgagaaggacgccgctctggagcgccggttccagcccgtcaccgtgggagaaccctccccggaggctacgctggagatcctgaagggactgcgggataagtacgaggctcaccaccgtctgaccatcaccgatggggcgctggaggccgccgtggcgctgtcccgccggtacatcaacgaccggttcctgccggataaggccatcgatctgatggacgaggccgccagtcaggtgcgtatggccgccgaatccgcctcccccgatctgaaggatctggaggagaagatcgccgccctgcaccgggagaaggaggaggctgtcgccgctcaggacttcgagaaggccgctcagctgcgggatatcgagaagaattatcaggagcaggtggagatcgagcgggataagtggcataagcagatgtccaccaaccgtggcaccgtcaccgaggacgacatcgccaaggtggtagccggctggaccggtatccccgtcacccgtctcaccgaggacgagagccagcgcctgctgaagctggaggagactctgcatcagcgggtggtgggtcaggacgaggctgtggccgccgtggccaaggccatccgccgcagccgtgtgggtctgaaggaccccaagcggcccatcggttccttcctgttcctgggccctaccggcgtgggcaagacggagctgtgcaagacgctggccgagtccatgttcggggatgagaacgccatgatccggatcgatatgtccgaatacatggagaagcacacggtgtcccggctggtgggctcgcctcccggctatgtgggtcacgaggagggcggtcagctcaccgaaaaggtgcgccgtcacccctactccgtggtgctgttcgatgagatcgagaaggcccaccccgatgtgtggaacattctgctgcagatcctggaggacggtatcgtcaccgactctcagggccgccgggtggacttcaagaacaccatcatcgtcatgacctccaacgtgggcgccaagaacatcaccgccgccgagaagccgctgggctttgacggcagcgatcccgacgcccagaaggacgaggcccagagcttcgcccgtatccgggaggccgttatgacggagctgcgccagaccttccggccggagttcctgaaccgtatcgacgagatcatcgtgttccgccagctgacggaggagaacatccgcagcatcgcccgccggatgctggacatcatcggcggccgcatggcccagcagggcatcaccctgcaggccgacgacgacgccgtggccgccctggccaaggacggctttgacgcccgctacggcgcccgtcccctgcgccgcaccctccagacggaggtggaggatgcagtggccgagcagatgctggaggggaaactccagtccggcgacaccgctcatgtgtgcctgaaggacggcaaggtggtcatcgagaagtaa

SEQ ID NO: 2331 - DNA, 1911 bp, Oscillibacter sp.
atgaagcacgtcatcatcggcaccgccggtcatgtggaccacggcaagaccatgctcatcaaggccctgaccggtatcgacactgaccgccttatcgaggagaaaaagcggggcattaccatcgagctgggctttgcccatatcgagtttgacgatcatacgcaggccggcattatcgacgtgccgggccacgagaaattcatcaagaatatgctggccggtgccggcggcatcgaccttgccatgctggtggtggcggcggacgagggcttcatgccccagaccgtggagcatctggatatcctgaccctgttgggcatccgggacggtgtggtggtcatcaccaagaccgatatggtggatgaggagtgggtggaaattgtccgggaggacatcgccgcccacgtcaaggggacatttttagagggcaaacctgtcctgccggtgtccgcttataccggtcagggcatcccggagctgaaaaaggagcttcagcagcgggtgagccgggtggccgtccgcaacgagcagatccccttccgtctgccggtggaccgggtgttctccaaggacggcttcggcaccgtggtcaccggcaccatgatcgagggcaacctttctgtgggcgacccggtggagctgatgccctccggccagcgggccaaggtccgcaccctgcaggtccacaaccactcggtggagcaggcctacgccgggcagcgggtggcggtaaatctggcgggcctgcggcgggatgccgtggtgcggggcgataccctttgcaagcccgataccctgcgcctgtcccggatgctggacgtgcgcctgaccgatctgaaggattcccaccgcatcatcgagaacggctccccggtacacttctaccacggggctgccgcccacatcgccaaggtggtgctgctggagcaggatgcgctggagccgggccagtccggctttgcccagctgcgctttacggagccggtggcggtgaagcggggggaccgcttcgttatccggttctactcccccatggagaccatcggcggcggcgtcattctggacgattgcccgccccgccataagcggcatcagccggaggtgatccgggccctgaccatccgggagggcggctccgccggcgcccagctgcagcagctggtggaggagtatggctacgccctgcccacggcccagaccctggcccagcgccagagtatgccggaggaggagatggtgcgggcactggaggatctggtgaacagcggcgatctgctggagatcctgccccggcgctatctggcggcccccctgtaccggagggcctgccagtcggtggagcaggtgctggcggagtatcacaaggccaaccccctccatgcgggcatgaaggtagcggccctgcggcagaaggccctccggggagcagagctgaaggaggccgacgccatccttaccgccatgctccggggcggcaccgtcaccgccattgccgaccgctgcgccctgccggacttccgggtggtgctcaccaagcgccagacggccctgcggcagaagctgctggacagctaccgtaagtccggtcgggaggtaccctttgtggacgacatctacgcctccttccccaccaacgagcgggacgactgcaaaaaggtgctggagaatctggtgtcctgcggcgaactggtgatgctgacgccccagctgttttaccacaaggatgtctatgaggaggtctgcgccctgacccgtgatttctttgagggccaccccgcctttacgctggcggagtaccgggacctgctgggaacctcccggaaatatgcgctggccattctggaatttttcgacaagaccaaggtgaccaaaatggtgggcgaccaccgggaggtcatcggaagcctgtga

SEQ ID NO: 2332 - DNA, 1965 bp, Oscillibacter sp.
atggaaaagaagaagttctatatcactacccccatttactacccctccgacaagctccacatcggacacacctactgcaccgtggccaccgatgccatggcccgctataagcggctcaccggctgcgatgtcatgttcctcaccggcaccgacgagcacggccagaagatcgaggacaaggccaaggccgcaggcaagacccccaaggagtttctggatgagatcgtggagggccccagagggatcctcgacctatggaagctgatgaacatctccaacgaccggttcatccgcaccaccgatgactatcatgtggccgccatccagaagatcttccggaggatgtatgacaagggggatatctataaggggacctaccggggcaagtactgcaagccctgcgagagcttctggaccgagagccagctggtggacggcaaatgccccgactgcggccgtgaggtgacggacgccgaggaggaggcctacttcttccggctgagcaagtacgccgaccgggtgcgtcacctgctggaggacacggattttctggagccccggagccgtgtcaatgagatggtcaacaacttcatcaagcccggtctggaggatctgtgcgtcagccgcaccagcttctcctggggcatcccggtggacttcgaccccggccacgtggtctatgtgtgggtggatgccctgttcaactacaccacggcactgggcttcctgaatgacaagtatgacgactacgagaagtactggcccgccgatgtccacttcgtgggcaaggagatcgtgcgcttccactccatcatctggccggccatgctcatgagcatggagatgcccctgcccaagaaggtctacggccacggctggctgctgctggacggcggcaagatgtccaagtccaagggcaatgtggtggatccctatctgctggcggagaagttcggtgtggatgccctgcggttcttcctgctgcggaccttccccttcggcagcgacggaaatttctccaatgagctgctgatccagaccatcaacatcgatctggctaacgatctgggcaatctggtgagccgcaccaccgccatggtggagaagtacttcggcggcactctgcccacggagcggcaggagggcgagccggatgcggagctgaggaccatggcctccaccctccgggatcgctatgaggcggagatggagcgcttccagttccagaatgcgctggagcaggtgttcaagaccatccagcgggccaacaagtatatcgacgagaacgccccgtgggcgctggccaaggatcccgccaaccgggtgcggctggctacggtgatgtatcatctgctggagaccatccgcatctgcgccacgctgctgacgccctttatgccggagagcgccgagaagatcttcgatcagatcggcgcttgccaaggctgccggacatgggagaaggccaacgtatggggctccctgcgccccgacgccacggtccacaagggcgaggccctgttcccccgcatcgacgccgaaaaggcgctggcagagttggaggagctggaggctcagcagcgcaaggcggcgctgccggcgctggaggtggagccctacacggaggagaaggtggacttcgacaccttctgcaagtccgatctgcgggcagtgaagatcaaggactgcgagccggtgaaaaagagcgacaagctgctgaagttcacgctggatgacggctccggcacggatcgggtcatcctctccggcatccggcactactatgagccggagcagctcatcggcaagaccgccgtggccattctgaatctgccgccccggaagatgatgggcatccccagctgcgggatgctgatctccgccgttcataaggagcggggggaggagaagctgcacctgctgctgctggacgacgcgatccctgccggcgccaagctgtgctga

SEQ ID NO: 2333 - DNA, 1899 bp, Oscillibacter sp.
gtcagccggagccgccggaaggaagaacggatgaaacaagaaaacggcaaaagagccatgaccgccggactgcggcggacgatggtgatcttcgtgctggatatgctgtgcatcgccgggtcctttttcctggcgctgtggatgcggtttgagttccgtctgggggccatccctcagatgtacctcaacgagtatttgaagatcatcgggccgtggatcgtcatctgtctggtggtgttccagctgttccggctgtataacagcatctggagctttgtcagcatcgacgagctgttccgcatcattctggcctatggcgtgctgctggcagccggactggcctatgtgctgatcctgaagatcgatatgccccgctccttctactttgcgggctttatcatgagcttcatgtccaccacggcactgcggttctcctaccgattcatgcgccagctgatggcggggatcagcacggagaaaagcgagcgggaccgcattctgatgatcggtgccggtgaggccggacgccagctgatccgggagatcaattccaatccccggctgggcagccgggtggtgtgcatcatcgacgacaaccccagcaagcgccgccggtatctggacggtgtagagatcgccggcgggcggcaggagatccccgatgcggtgaagaagtaccaggtcaataagatcattttcgccatccccacctgcgacggacaggaccgcaaggagattctggacatctgcagcaagaccggctgccgggtgcaggcggtgccggggatgttccagctggtcaacggcgaggtcagtgtcagcaagctccgggacgtggagctgcaggatctgctgggccgtgaccctattcaggtgaatctggaggagatctgccggtatatctccggcaaggtggtgatggtcaccggcggcggcggttccatcggcagcgagctgtgccgccagatcgccaaaagcaagcccgaacagctgatcatcttcgatatttatgagaacaacgcctacgatatccagatggagctgcgccacacccatccggagctgaatctggaggtgctcatcggctccgtgcgggacatgggccgtctggacgatgtcatggccaagtaccggccggagctggtgttccacgccgccgcccacaagcatgtccccctgatggaggacagccccaacgaggccatcaagaacaacgtcttcggcacctataaaatggccatggcctcggtgaagtacggcgtgaagaagttcgtgctgatctccacggataaggcggtgaaccccaccaacatcatgggcgcctctaagcgcctgtgcgagatggtggtgcagatgatgaaccgccgcagccccaatacggacttcgtggcggtgcgcttcggcaatgtgctgggcagcaacggcagcgtcatccccctgttcaaaaagcagatcgctgagggcggcccggtaacggtgacgcacccggagatcacccgcttctttatgaccatccccgaagcggtgtcgctggtgctgcaggcgggatactacgccaagggcggcgagatattcattctggatatgggccagccggtgaagatcgacaccatggcccgcaaccttatccgcctgtccggtcatgagccggatgtggatatcaaggtagtctacacgggcctgcgccccggcgagaagctatatgaggagatcctcatggcggaggagggcctgcaggagacctccaacaagctgatccacatcggaaagcccatcgtcatggacgacgaggagttctgccaccagttggatcggctggagaaggcctgtcaggaggagacggaggacatgaaggacatcgtggcctcggtggtccccacctatcgccgcaagaaataa

SEQ ID NO: 2334 - DNA, 2376 bp, Oscillibacter sp.
atgaataccatcaatatccccgttctggcgctgcggggcatgaccgccttccccggcgaaactgtaagcttcgacgtggagcgggagatttccatttttgcgctggacaacgctatggagggcgaccgtcgtctgtttctggtgacgcagcggaagatcggcgtctccgaaccggcggagcaggatctctacgagatcggcacggtgtgccatgtgctccagatcatcaagacctccgagactacggtacgagtgctggtggagggtgagcagcgggcgagactgcatcgtctgtggcagacctccccgtttttgcaggccaatgtggagctgctggaggatgccccctaccgaagcacctctcacacggaggcgctgctgcggcagacctacgccatcttcggcgcctataaggagctgtccccccagatgtccgacgaggtggtggcgcaggtgctggatcagcgtgatcccggccgcctggcggatttcatcgcccagaacctgaccctgcggcatcaggaccggcagcgggtactggatcaactgcacccggtgaagcggctccagctggtcaatgacatcctcacccacgaggtggacgtcatggggctggagttcgagatggagcagaaggtgcgccagcgggtggcgcaggtccagaaggatatgatcctccgggaacagctgaaggtgctgcagcacgagctgggggaggacggcgacgaggagctgtcggattatgaggcccgcatcaccgccctgcacctgccggaggagctgcaccgcaagctcatgaaggaggtagaccggctggccaagcagcccttcggcagcgccgagggctccgtcatccgcaactatctggacgtgtgtctggagctgccgtggggcaagtacacccgtgaccgggcggacgtggcgcaggcccggcgcatccttgaccgggatcacttcggtctggagcaggtgaaggagcgtattctggagttcgtggcggtgcggcagctgagccctgactccaaggggaagatcctctgtctggttggccctcccggcgtgggcaagacctccatcgccctgtcggtatccaaggccctgcaccggaagatggcccggctgagtctgggcggcgtccgggacgaggcggacatccggggccaccgcaagacctacatcggcgccatgccgggccgcatcatcgacgccatctcccgcagcggctccatgaatcccctgttggtgctggacgagatcgacaagctgggcagcgatatgcggggcgaccccgcctccgccctgctggaggtgctggacagcgagcagaactacgccttccgggatcactatctggagatcccggtggatctgagtcaggtgctgttcatcaccaccgccaacaccacctccaccattccccggcccctgctggaccggatggaggtcatcgagctcaccagctacaccgacgaggagaagctgcagatcgccaagcgctatctgctgccccggcagatgaaggagcatgggctgaaaaagacccagctgcgcctgtcggacgacgccatccggcagatcatctccggctataccagagaatccggcgttcgactgttggagcggcagctgggcaaggtgtgccgcaagaccgccatgcgtctggtggacggtggggagaagcgggtgaatgtgacccccgactccctgcgggagctgttgggcgtggtgcgttatcaggacggcgtacatagcacacggaatcaggtgggcgtggtgaacggtctggcctggaccgaggtaggcggcgaaattctggaggtggaggccggcgtcatagagggctccggcaagctggagctcaccggcaatctgggtaccgtcatgcaggagtccgtccgggcggcgctgacgtgcttgcggagccggtgcggcgagctgggcatcgagaaggatttttacaagacccgtgacatccacgtccacttcccggagggggcggtacctaaggacggcccctccgccggcatcgccatcaccaccgccatgctctccgctctgacggggcggaaggtccggggcgatgtggccatgaccggcgaggtgacgctgcggggccgggtactgcccatcggcggactgaaggaaaagaccatggccgctctccgcagcggcatccgcacggtgatcctccccaaggacaacgtcaaggatctggaggagatcgaccagaccgtccggacggccctgcacttcgtgccggtggagagcgtggatcaggtgtttgcggcagcgttggtcccctcccctgccgtgtcggcggtggagcatatgaccgccctgcccatggaaccggctgccccggccctgcgagtctga

SEQ ID NO: 2335 - DNA, 3537 bp, Oscillibacter sp.
atggggagttttgagcccacgtcggagcagcggcgggccatagaggatcggggcggcagcctgctggtgtccgccgccgccggctccggcaagaccaaggtgctggtggagcggctgttcggctatatggagcgggagcgctgccgcatcgacgacttcctcatcatcacctttaccaaggcggcggcggcggagctgcggggcaggatcgccgcagagctgagccagagagtggcccggcagccggagaatatgcacctgcgccgccagatgatgcgggtgtatcaggcggacatcaaaacggtggacgccttttgcgggagcctgctgcgggagaacatccacctgctgccgccggagggacagcgaagcctgaccccggatttccgggtgctggatcagcaggaggcggagctgctgcggatgcaggtgctggagcaggtattggaggagttttaccagcgcatcggccggggggatacccaggcccaacagctggcggagacgctgggcgccgggcgggacgaccgggcgctggagcggctggtgctggacatccacgggaagatccagagccacgcctaccccatgcggtggctggagcggctgcgggagcagtggcagcaggtgccggagtccgtggggccttaccgggaggtgctgacggacagcatcctgcggcggacccggttctgggcgaggaagctgacggagacggcggcgtggatggagcagtatccggatctgtaccggggctacggcgaccggtttctggagatggcggagcagctgcagggctacgagacggcggcgcaggagggctgggacgccatggcccggctgaagcccgccttccggcggatgggcgtcgtcaagggctgcgacggggccaaggagcaggcgcaggcggtacgcaagcggtgcaaggacgagctggatgagatcggtgcgctgctggcggtcagcgagagcgagcagctggaggatctggaggccatggccccggccatgctggcgctggtgcagctgacggaggatttcaccgccgcctatcaggcggagaaggtgcggcgcaactgcatggatttcagcgatcaggaacattatgccatccggcttttgcagggtgacgacggtgcgccgacgccgctggggcggcaactgtccgggcgataccgggagatcatggtggacgagtatcaggacaccaatgaggtgcagaactgcatcttccgggccatttcacgggacgggcagaacctgttcaccgtgggggatgtgaagcagagcatctatcggttccggctggcggaccccaccatttttctggagaaatatctggcctaccggccggcagaggaggcagaggaggggcagccacgaaaggtgctgctgagccagaacttccgctcccggcggcaggtgctttcggctgccaactttgtgtttggcagcatcatgtcccggcagatgggagagatggactacgggccggaggaacaactgaactacggggccacgggttatccggagcgcagcgacacggatacggagttccatctgatcagcgtggcggacagcgaggaggaacgcttcgaccggacggaggtggaggcccggttcgtggcccatcgcatccggcagctgctggacgagggcttccccgtgcagggggaggacgggcagcagcggcctgtccgaccggaggatatcgtgatcctgatgcgctctccggcagcaaggcggaaggccttcacggcggccctgcagcgggaggatatcccctgtaccggcggggaggagcagtccttcttcgagaccatggagatcgccgtgatggtgtcgtttttgcagatcgtggacaatccacggcaggatgtgccgctgctggcggtgctgcggtcgccgctgctgggcttttcgccggatcggctggcccagatccggagcgggcatccggggggagactactacggcgctctgtgtgccgacgacggcgaggatagccgtgcctttctggagcggctggcgcagctgcgggcggcggccggggaactgacggcggaccggctgctgtggaagctgtatacggactggcaggcactggcggtgttcggggccatggaggggggtgcgcagcggcgcagcaatctgctggcgctgtacgcctacgccgggcagctggcggctgcgggacgggggaacctgttcgattttgtcagctatctgcatgacttgatggagagcggcgacctgccggatatcagcgcaaggcaggagagcggcggtgtacagctgatgaccatccacaagtccaagggactggagttcccggtggtgatcctggcggatctgcagaagggcttcaaccgggacgatttccagcggcccgtgctggtgcatccccggctgggactggggacggagcgggtggatcggcagcggcgcatccggtacgataccgtctccaagcaggccattcagctggccctgtcacgggagagtctggcggaggagatgcggatcctgtacgtggccatgacccgtgccaaggagaagctgatctgcgtggactgtatgcgctttgcacgcaatcgggtccggggcctgctcagtgtggcgggctgtcctgcggcgccggaggccgtggggagcgctaaggcgccgggggactggatcctgctgccgctgctgtgtacgccggaggcggcggtgctgcggcagtgggcggacatggagccggagcagccggccctctccgatggcggctggcaggtgcggctgtgggagaacccggtgtttgaatgtgggtctgcggctgcgtccccggaggaggctgcggtgcaggagcgacggtatgatctctccgccatggaactgcgctatggccacacggcggcctgcaccatccccaccaaggtgacggccacccagctgaagggcagggtgctggatgaggagatcgcagagggggcggcatccgcccggccccggcggctggacttccagaggcccctctttttgcagcaggagcgcaggctcaccgctgcggaacgggggacggccatgcatctggtgatgcagtatctggagctgggcggcccggacccggaggagcaggtgcggcggctcacggatcggcggcttctgacaccccagcaggcggaggcggtggacacagagcgcatccgggcgtttctggcgacgccgctggcgcaggagatccggcaggcccggcaggtctggcgggagtatcgctttgccctgctgatgccggcggcgctgtatgacccggcggcggagggagaggagctgatgcttcagggcgtggtggactgcgccttccgcacggaggaggggcttgtggtggtggacttcaagaccgaccgcttggctcccggcgaggagccgcagcgggcggaggagtaccggccccagctggaggcctatgctcaggcgctggagcgggtgatggaggagaaggtctgccgcaaggtattgtactttttctccacgggcgccacaataaatttgtaa

SEQ ID NO: 2336 - DNA, 2106 bp, Oscillibacter sp.
atgccgagaaaggttacactggaaaatacaaggaatatcggcatcatggcccacattgatgcaggaaagaccaccacgaccgagcgtattctgtactacaccggcgtcaactacaagatcggtgaaacgcacgagggtacggctaccatggactggatggagcaggagcaggagcgtggtatcaccatcacctccgccgctaccacctgctactggaagggttccaagaaccagtttcctcagacccgtatcaacatcatcgacacccccggtcacgtggacttcactgtggaagtggagcgttctctgcgtgtgctggacggttctgtcaccgtgatgtgcgccaaaggcggtgtggagccccagtctgagacggtgtggcgtcaggccgatcactatcatgttccccggatggtgtacgtcaataagatggacatcaccggcgccgatttctatcacgtgctggacatgatccatgatcgtctgaagtgcaacgccgtgcccatccagctgcccatcgggaaggaggataccttcaagggtatcatcgatctggtggagatggatgctgatatctactacgatcagctgggcaaggatatgcgtgtggagcccatccctgaggacatggtggacttggccaacgagtatcgtgagaagctgctggacgccgtttccatgttcgatgatgagatcatggagatgtatctggagggtcaggagatccccgcttccaagatccgtgccgccatccgtaaggccacgctggctgtggaaatggtgcctgtcacctgcggttcttcctaccgcaacaagggcgtccagaagctgctggatgccgtggtggactatatgcccgctcccaccgatatcgaggccatcaggggtgtcaaccccaagaccgaggaggaggaggaccgtcacgcttccgacgacgagcccttcgccgcactggccttcaagatcatgaccgacccatatgtgggccgtctgagcttcttccgtgtgtactccggtacgctgaacacaggttctgcggtgctcaatgccaccaagaacaagcgtgagcgtgtgggtcgtctgctgcagatgcacgccaatcaccgtgaggatctggagaccgtctatgccggcgacatcgccgccatggtgggcctgaagaacaccaccacgggtgataccctgtgcgacgagaagaaccccatcgttctggagtccatggaattccccgagcctgtgatccgcgtggccatcgagcccaagaccaaggccggtcaggagaagatgggcatcgctctggccaagctggccgaggaggatcccaccttccgggcctacaccgacgaggagacgggtcagaccatcatcgccggtatgggtgagctgcatctggagatcatcgtggaccgtctgctgcgtgagttcaaggtagaggccaatgtgggcgctcctcaagtggcttacaaggagaccgtccgcaagaaggtcaaccacgagaccaagtacaagcgccagagcggtggttccggccagtacggtcacgtgaagatcacgctggagcccaacgagtccggcaagggctacgagtttgtcaatgccgtcgtgggcggcgccattcccaaggagtatatccccgccatcgacgccggtattcagggcgccatgcaggcgggcgtgctggccggctatcccgtggtggatgtgaaggtcacgctgtacgatggttcttaccacgaggtggactcctccgaaatggcctttaagatcgccggctccatggcctttaaagaggctatgcgtgaggcggatcccgtcctgctggagcccatcatgaaggtgtgcgttatcgtacccgacgagtatatgggcgacgtcatcggtgatctgaatgcccgccgtggccagattcagggctacgagatgcgctccggcgcccagcagatcgatgcctttgtccccctgtccgagatgttcggctatgctaccaacctgcgctcccgcacccagggccgtggccagtacaccatggaacccagccactatgtggagctgcccaagagtctgcaggagaagctggtcagcaagcgcagcggccatgaggcgtaa

SEQ ID NO: 2337 - DNA, 3489 bp, Oscillibacter sp.
atgggatttgtgcatcttcatgtgcatacggaatacagcctgctggacggggcctgccgcatccgggaccttccggcccgcatcaagggaatgggccagacggcggtggccatcaccgaccacggggtcatgtatggtgccatcgacttctaccgggcctgcaaggcggaaggcatccatccgatcatcgggtgcgaggtgtatgtggcccgccgcacccggttcgataaggttcatgaatatgacgccgagtccaggcatctggtgctgctgtgtaaaaacgagacgggctaccggaacctgtcgtacatggtgagtcaggcatttgtggagggcttttacatcaagccccgcatcgatctggacctgctgcgccagcacagcgagggacttatcgccctgtcggcctgtctggccggggagatccccaagcggctggtaaacggcgactacgacggggccaaggagtacgccctgaccatgcaggagatcttcggggaggataacttctatctggaactgcaggaccacggcatcccccagcagacgctggtgaaccgggatctgctccgcatccatcaggagacgggcatcccactggtctgcaccaacgacgcccactacctgcggccggaggacgctgagagccacgatgtactgctgtgcatccagacgggcaagaccgtagacgacgagaaccggatgcgctatgagccgagaaacttctacctccgctccacggaggagatggaggagctgttcggcgcctatcccgacgccgtagccaacacccagcgcatcgccgaccgctgccaaatggagttcacctttggcaagtatcatctgccggagttccggctgccgccgggggtagattctcccacctatctgcggcagctgtgcgaaaaggggttcaccgagcgctacggcacggagcacgaggactaccgccgccagctggactacgagctggacatgatcggacgcatgggctttacggattattttctcattgtgtcggatttcgtccgatacgccaaggatgccggtatccccgtgggaccgggccgaggctcggcggcggggagcatggtctcctactgtctgcgcatcacggacatcgaccccatgcagtaccatttgtattttgagcgcttcctgaatccggagcgggtatccatgccggatatcgatatggacttcggagacacccgccggggcgaggtggtggactacgttcgccgcaagtacggcgacgaccatgtggcccagatcgtcaccttcggcaccatggcggcacgggccgccattcgggatgtgggtcgggcgctgaacatgacctatgccgaggtggatgtggtggctaagctggtgccaacggccctgcacatcacgatcaaggatgcgctgaagctgtccaagcagctctccgacctctatgagacggatgaacgggttcgccggctcatcaacatggcgcaggcgctggaggggatgccccgccacgcctccacccacgcagccggtgtggtcatcaccaagcggccggtatatgagtatgtaccgctggcccggaacgacgagtccatcgtctgccagtacaccatggtgacgctggaggagctggggctgctgaaaatggattttctgggcctgcggaacctgacggttttggacgacgccgtgaagatggtgcagaagtaccgaccggacttccggctggcggatatccctatggacgatgcagcggtgttcgagatgctgtcgcagggcaagaccggcggcgtatttcagatggagtccgccggcatgaccggggtgtgcgtggggctgaagccccagagcatcgaggacatcaccgccatcatcgccctgtaccgccccggccccatggagtccatcccccggttcgtcgcctgcaagcacgaccccaagctggtggtgtacaagcacccttccctccagcccatcctgtccggtacctatgggtgcatcgtctatcaggagcaggtcatccagatcttccagcagctggcgggctattcgctggggcaggcggacatggtgcgtcgggccatgtccaagaagaaggccaaggatgtggagcgggagcgggaggcattcctccacggcgaccccgcccggaacatccggggctgtgtggccaacggcatcccggaggcaacggctcaggccatctacgacgaaatctacgacttcgccaactacgccttcaataaggcccacgccgtcagctatgcggtggtggcctatcagacggcgtatttcaagcgctacttcacacgggagtacatggcggcgctgctgacgtcggtgctggataactccgacaaggtggcggagtacatcgctgagtgccgggactgcggcattgagctgctgcccccggacgtgaaccgctccagcgacggcttcaccgtggaggatggaggcatccgcttcgggctggtggccatcaagaacatcggccggggctttatccagaccatgatgcggcggcgggagcaggacggccccttccggtcgtttcaggacttctgccagcggatgttcgactgcacggacatgaacaagcgggcagttgagaatctgatccgcagcggtgccttcgactccatgaaggtgcggcgctcccagctgatccaggtctttgaaaaagtgctggacagcattgcagagtcccggcgcaagaacgtggagggccagctggatctgttcggtatggcggcgggggaggacgccccgccggcggagacgcccctgccggacattccggagttcaccgccgccgagcggatgttcatggagaaggagactacgggcctttatctcagcggccaccccatggcggattaccgggcaatggcccggcaggcgggagcggtgcctatccacaccattctggaggacttttccgccgaggacgggcctgtccggttcgccgacggccagagcatcaccattgcgggcatcgtcaccgccagccgcacccgcaccacccgcaataacgccctcatggcctacgtgacggtggaggatgaggcggcatccatcgagctgctgtgcttcagccgcaccattgagcgctgcggcagctatatgcaggtgaacagcccggtgctggtgcaggggaagctctccgtccgggacgagaagccgccgcagatcatgtgcgacagcgtttatcccctgaaggaggggctgccgccccggcgggagaaccgccgtccggcacaggagaacgccaccatttatctgcgggtccccggcatggacagcccggcgttccagcatatcaagctggtgatgaccatgttcgagggggacacgccgctgaagatccggctggcggacagcggcaagctgttgggggccaagtgcctgaaccacccggccttcgtgcaggagtgccgggagtggctgggtccggagaacgtggtggtgaaaaccgccttcaccggaaaatga

SEQ ID NO: 2338 - DNA, 2442 bp, Oscillibacter sp.
atgaaagtttcactgaattggatcaaggattatgtaaagctcccggaggatatggacctgacccgtctggcctatgacctgaccatgtccaccgtggaggtggagggggccgaggacctggccaagcgcttcgagcatatgctggtgggcgtggtgacggaggtttgtccccatcccaacgccgacaagctgcggatctgccggacggatatcggcggcggcgatatccgggagatcgtctgcggcggcaccaacctcaccgccgggatgcgggtggccgtggcctgccccggcgccctgtgccgctggcacggcgagggtgagccggtggaaattaaggagtccaagctgcggggcgtcaagagctacggtatgatctgcgccgcctccgagatcgggctgggggatctgttccccaccgatgaggaggcccacattctggacctcagcgcctttgacgtagccgccggcacctccattgccgatgcgctggaccttcacgacatcattctggagatcgacaacaagtctatgaccaaccgccccgacctgtggggccactacggtctggcccgtgagatcgccgccctgtacgggctgcccctgtcccggttccggcccttcccccgtgatctgcctgccggcgacctgacggtgacggtggaggacccggagcgctgcccccggtacatcggggctgagctgaccggcgtgtgcgtcaagtcctcccccttctggatgcagagccgcctgtggcgtgcggggatgcggcccatcaatgcgctggtggatatcaccaactatgtgatgctggccaccggtcagcccacccatgccttcgactccgacaacattcaaggccatatcatcgtccgccgggccaaggagggcgaaaagctgctactgctcaacggcaaggacctctccctctccgccgacgatctggtcattgccgacgatgccggtgttgtggcgctggcgggcgtcatgggcggtgccaaggactccatcctgcccaccacccacaaggtcattctggaggtggccaacttcaacgccgccggcgtccgccggacggctctgcggtacgataaccgcaccgaggcctcctcccgctatgaaaaggccatcgacccccagcgctgcgatcaggcgctggagctggcggcggagctgttccgccagctgtatccggaggtgcagttcacgggccttgtggaccactaccccgcccccatggcctgcaaggagctggacgtggctctcagctggctggaacgccgtctgggcaaacccctgacgcaggaggatgtatctcataagctgggcctgctgggctttaccacctccttcatcggcgacaccatgcacgtcaccgttccctcctggcgctccaccggcgacgtgtctattcaggcggacattatggaggaggtagcccggatgtacggctacgagaacttcgaggccgcccccatcaccacctccttcgacggggccatcaaccagctggataaggatctggagcggcgcatcaaggagtatctggccatccgctgcgggctgcaggagatcttcacctacccgtggatggatgagcagtatgtaaacgccatcctgcaggacaccaccggcatcctgtccctgtccacgcccccctcccccacggagaagatgatccgctcctccctgctgcccaatctctgcaaggcagtggtgaagaacgagcgctacttcaccgacttctccctctttgaaacggcgcaggtattccgggacgagaactacaccgctccctacgatgaacgggagaagctgccctcccagcgcaagcatctgggcgccgccttcgtgggcagcgacaaggacatcaccaccctgttccgccgggccaagggcgtggtggagaccatgccccgctacacccatatggaggactataccctccgtcaggtggaaaagcccgtgtgggccgacaccgtggtgtggctgaacctgtatctgggagaggagcacatcggtgatctggccctgctgagcaaaaaggtatccatggagtgcggcatcaagaatctggcggtgatgctgctggagctggatatggacgcattgatccccttccgctcccgcaccaacaccttcacccacctgccggagtaccccatgacggactacgacgtgtcggtgctggtggacggcgagacccggtgggatgctatgcgggacgctattctggaaaagcgccacgagctgctccacggcgtatcctttgtggacgagtaccggggcaagcaggtgccggagggcaagaagtccgtgaccctgcgtctgaccatcggttctgcggaaaagaccctgacctctcaggagatcgaggcctgcgccgcctccgccgtgaagcggctggcaaagcacgtgggcgccgagctgcggggaaaataa

SEQ ID NO: 2339 - DNA, 1449 bp, Oscillibacter sp.
atgacagagcgcaagaaacggttcagcgggctctactggcagcagttcgccctgaccgccggcatggtgatgctgacgctgctgctgctgggcgtgtcctttttcgccctgagctataactataacttcaccgagcggcgggacgagctgcaggagcgggccagtctcattgctcaggtgtccgtggactacctgaagtccggcggccagacggaggatgaaaacctcaagcgcttcatcagtctgggcagcgccatgaccaacgccgaatttctggtgtgcaacgacagcggctatgccctgctgacggcggaccagcggctggggggcaaggtggtggccatcccgcaggagatcacgcaggaggtcctgacgggcagcggcctgtatcagggccgcagcagtctgggcggcgcctacacctccaaacagttcgtggtgggcgtccccgttcaggacggcgaccagaccatcggcatggtgctggcggtgatgaacgcccgctccgtcatggggatgtggcggtccttcatcagcctgttcctcatgacctccgccatcatcctgctgctggtgttcatcgtcacctccctgacctccatgcggcagatccagcccatccgggagatggtgcaggccacacgggcctacgccgccgggaacttcgatgtacggatgcaggacgccgaccggggcgatgagatcggcgaactggcggcgggctttaacaacatggcggactctctggcggagacggagcgccagcgccgggacttcatcgccaacatctcccatgaattaaagacccccatgacctccatcgccggctacaccgacggtattctggacggcaccatcccgccggaaaaagaacgcaagtacctgcaaattatctccgacgagagccgtcggctcagccgtctggtgcgccggatgctggatatctctcagatccagtcgcaggagatgaaaaaagaggacttcgacctgtgcgagagtatgcgtctggcgctgctgtccatggagcagaagatcaccgaccgggagttggacgtagaggcggacatcccggaggagcctgtgatggtggagggcgtcaacgacctcatcacgcaggtcatttacaacctgctggaaaacgccaccaagtttgccgctccccactcatccctgtatctggggctggccgtccatggggagaaggccgtggtcacggtgcgcaacgtcggtcagaccatccccgccgaggagatccccctgctgtttgagcgcttccacaagtccgacaaatcccgcagcgaggataaggacggctacgggctgggcctgtacgtggtaaagaccatcctgtctcagcacaaggagcagatcaccgtcaccagcgaaaacggcgtcaccgccttcagctttaccgttcagatggctcaccccatgcggaacgaaccgtga

SEQ ID NO: 2340 - DNA, 2106 bp, Oscillibacter sp.
atgaacgagaagaatgtacgaagcatcccggagctttttggcagcatggtattcagccaggctcagatgcgacagcgtctgccggcacgggtctatgacgcatggcagcagtgcctgatccaaggaacttctctggatcgctccatcgccgacgagatcgccgccgccatgaaggactgggccatcgaaaagggcgctacccactacacccactggttccagcccatgacgggctttaccgccgagaagcacgacagcttcatcgcccccaacgtccccggcaccattttgatggagctgtccggcaaggagctgtcgcagggtgaggcggacgcctccagcttcccctccggcggtctgcgggccaccttcgaggcccgtggttatacggcgtgggatcccacgtcctatgccttcatcaaggatcagaccctgtatatccccaccatcttctgctcctacggtggcgagacgctggataaaaagacgcctctgctgcgctctatgaagcagctggatacacaggccgtccgcatcctgcggctgttcggcaacaccacggtgcagcacgttaccgctcaggtggggccggagcaggagtatttcctcatcgacaaggccatgtatcgccgccgggaggatctgatgctctgcggtcgcacgctgttcggtgccaagccgcccaaggggcaggaactggacgaccactactacggtgccatcaagccccgtgtggcgtccttcatgcacgagctggatcaggagctgtggcaggtgggcgtgctggccaagacggagcacaatgaggtagctcccgcccagcatgagatcgccccggtgtactccgacgccaacagcgcctgcgaccacaatcagctgaccatggagtttctgaagaaagtggccgaccgccacgatctggtgtgcctgctccacgaaaagccctttgccggggtcaacggcagcggcaagcacgacaactggtcgctggccacggataccggcgagaacctcctcaagcccggacgcacccccagtcagaacgcacagttcctgctgtttctggcggccttcatcaagggcgtggacgagtatcaggagatgctgcgctgctgcgtgtcctatcccggcaacgaccaccggctgggcgggaacgaggcgcctcccgccattgtgtctatcttccttggcgacgaactgacggccatcctccgctccatcatcgacggcacggcctatgtggacatcaccaagaagaagctggagatcggcgtggacaccctgccggagctgccgcaggataccaccgaccgcaaccgcacctccccgctggcctttaccggcaacaagttcgagttccggatgttgggctcctcccagtccatcgccagccccaatgtggtgctcaacaccatcatggccgacgagctgaagcagtttgccgaccggctggagaaggcggagaacttccatcaggccctgcaggagctgctgcgggataccttccgggatcaccagcgcattatcttcgacggtaacggctacgacgacgactgggtacaggaggccaagcgccggggactgagcaatctgcgggacaccgtggactgtatgcccgcctacatcgacgagaagaatgtggcgctgttttcccgcttcggcatcctgacgccggaggagatgcacgcccggtatgagatccatctggagaattactgcaaggtcacggccattgaggccgctaccctgcgggatatgaccctgcggggcatcctgcccgccgtcacccgctacaccggcgatctggccaagggcgttgtgaggaagcggcaggcggagatgaccacctcctgccgggtggagagctatctggtgacgcagctggacgccctcagcggcgacctgctggacgcctgccaggctatgagccgggcgctggaggccgctcccgccgccgatgccggcatcgacgccgcccggtactaccgggatcaggtggcctcccggctggaggagatgcggagcatcatcgaccgcatggagccgctggtgggagccgactactggccctatcccacctatgcagacatcctgttctccgtgtaa

SEQ ID NO: 2341 - DNA, 1908 bp, Oscillibacter sp.
atgaaaaagaataaatttctggctgtgatcttagccatggcggtggccgtaggcgccgccggcgtcaccacctacgccgtgggcaaggacgccaatgataccgaggccccgtccaccgtggtgacggccgcctccgcctccgacacggaggccgtcaaggatgagacggtatacgtcatgaccgctgccgacggcagcacccagaagatcctggtcagcgactggatcaagaacgccctgcccgccgaggcccggaaggccatcgagagcctgaacgacgcccagcaggtgaaggacgactgctggaccggcaccatccagaaggagctgccggtgagcatgagcatccactacaccctggacggcaagaccgtcacccccagcgagctggcgggcaagagcggcaaggcgaccatccgcttcgagtatgaaaacaaccagtatgaggtgcgtaccgtcaacggcgtcagccagaaggtgtatgtccccttcgtggccctcaccggcgccctgctggatacctcccacttctccaatgtcaccgtctccaacggtaagctcatcaacgacggcgaccgcatcgccgtcatgggcatggccttccccggcctgcaggaggatctgggcatcagcaaggagcagctggacctgcccgactatgtggagatcagcgccgacgtaacggacttcacgctggagaccaccctcaccgtcgtctccaacagcctcctcaatgaggtggataccgacgaccttacctccggcgatctggggagcctgtccgattccctgggcaagctcacggatgccatggatcagctgatggacggttcctcccagctgtatgacggactctgcacgctgctggacagctgcggacagctgtctgacggcgtggatcagctgacggacggtctggatcagctcagctccaacagcagcgccctggacgccggggccaagcaggtctttacctccctgctggctatggccgatgagcagctgcagccccatctggcgcaggcgggcatcaccatcccctccctgaccattgacaactacaccaccgtgctgggcggcgtgctggcccagctggacgaggccggtacgctggccgagcaggccgcccgtgagcaggtgactgccgccgtggaggccgcacgggatcagatccgtgccgctgtgaccgaggccgtgcagcagcaggtaacggcgcaggtgacggagcaggtgcgccagcaggtgctggggcaggtgctcaacgccatgggctacaccatggagcagtatcagcagagtcctgagctgaaggcgcaagtggatgccgccgtggagctgcagatgcagactcccgccatgcagcagaccatctccgagaatgtgacggcccttatggggacggaggagatccggcagaagatcgacgccgccacggagcagcaggtgcagctgaagatcgaggagaccatggcctccgacgaggtgcagcagaagatcatggccgctacggagcaagcctccgccggtgccgtgcagatccgcagcctgaagcagcagctggaccagtacaacgtgttctacatgggcctgaatagctacaccgccggtgtggatcaggctgccgccggtgctcggcagctccagagcaatatgcccgccctgctggatggcgtgaagcagctgcgggacggcgccatgcagctctccgacggactgaagcagttcaacgaggagggcgtggagaagctggtcagcgtgctgggcgacgacgtggaggggctggcggagcgtctgaccgccacggtggaggtctcctgcaactaccgcagcttctccgggctgacggacggcatggacggcgctgtgcgcttcatctaccgcaccgaggccgtggaaaaggccgagtga

SEQ ID NO: 2342 - DNA, 8580 bp, Oscillibacter sp.
atgcacttgcgcagtaagaccgtgcagcagctcctgtcggtgatcctgtcggcagtcatggtcttatccatgctgccgatggaggtcctggctcaggagacgccgccggtgaccactcccatggacctgaccgccatcacggaggatacctccggcgacggctggtcgtggacacaaagcaccaagaccctgaccctcacgggcctgaccctgacggtcagcgacgacagcacccatgcgctgatcctgcccgacggggccaccatcgatctggccgacggtaccgccagcaccctcaccggcggcagcagatccaccgtatacagcagcggcgaggtgaagctgcgcggcagcggcagcctgacggtctatggccggggctggcgcagcgccacgctggatatgttcatccccggcacgctgacggtggagtatgacgaccccgacggcggtgccgtgctcaagactgacgagggtaccgagggcgcagccatctgcgccaacgtcacgctggataacggcatcctccgggccaccggtccggactttgcctccgccgacgacggcagcagcgtcggcctccggggccgcctcaccacccacggcagctccgtggaggcccagctcaccgcccgcaccggctatgccagctatggtctgtacttcgacaagcagggcagtggccggggcgacacctggaccatgggactgggcaaggtgaccgccgccgcaggccacgccctgagcaactacagctacggcctgtacgtggattacagctccgtcaatgcgctggagctggacggcactcagctgacggccatgggcggcgagagtgaccagtacggcagccagggcgtgttcgccggcgaggagatcatcgtcaagaacggcgccaccgtcaccgccaccggcggacaggtcaacagctcctatgagagcgtcggcttcaatgccgtcagctggctcaccgtgtccggagagaactccagggtgctgggctacggcggcacctccgtcaagggcgattccaagggtgtccgatgcgacagccgcttcactctcaccgacggctgcgtcttcggtcagggcggcgtgtcctgcaccagctccagaaatgtaggcgtcgagttcaagcgtctcatgatggaaagcggcaagctggagggcatctccggcagccccgactcgtcgtaccagacctggggcggccagtttaacgcctacggcctttactgcaccggcaccgccaagatcaccggcggtgagctgatcggcaccgccaacggcacggaccgggaactggattacagcgcctacggcttctacggaagcaatgagctgaccatgagcggcggcaccctccgggccaccaccggcgacacccctaacgccagttccgggacgctggcggccctcagcgtggtctccaacaagtccaagacccagctcagcggcggcaccatctacgccagagccggtgtctccaacgatgaccgcagctacggtatgcggatcctcggcaccggctctaccctcaccatgaccaataccgaggacgccgcccagcccctgagtctctacgtcaccggccggaacatggccctttacgccaccgctctggcagacggcggcctcctgccggagatcaccgcctcctccgcctacgatgccggggccgacaccctcaccgatggctacaccttctccaacaagcaataccggaaggacggcacggcggccctgtccctgtccgcagccgcctgcctccacagcgccagcgatgataccggcctgtgtaccaagtgcggcaagcgggtatacgaggctatgctgctgacggacggtgccgtcacccagcgctatgccgccgccggcgaagccttcaccgccgcccagacggaggagcatcagggctgcaccctgcggctgctgacagatctcatcgacgacggcaagcctctggtccacgacccggtagtgactatcaccggtggtcggttcacgctggacctccacggccataccatagcgggcaagacctccgactataaggagggtgtcgtcaccgtcaccggcggccagctccgcatcgaaaacggcacactggagaacctctacaccggcaacgacagcaaggcccaggccctgacccttctgggcaccggcacccatgtgacgctggccaatgtcaccgccatcggggccacgccccccaacggcgacaccagtgcctccgtctatgcccccgacggtgcccgtctcaccatcgagagcggcgagttcaccggccgggttgccggcacctacgcctctgctccggcggagacgccccacgtctccattgccggaggcaccttccacaacggcctgtcctactccatccacgagacggaggccaacgccgccacccttctggccattctgaaggagggctatgcgctggcccacgccgacggcacgccggtggatctgggtaccgagccctccttcagccgcctctccggcacctatacgctcagcggcgaggtgcaggtggtggcccacacccacaacgtccgcagcggacggccgggctactgtggctgcggctatgcctgcccccacgacggccagatgccggacagctactttgcgctgccggtttgctccctgtgcggcgtctcctacggcactcccctcaaggacctgcgcacgcccaccggcaagatcatcatcgatgaaaacaactggtggcaggacttcctgaacaccgtcaccttcggtctgttcttccccaccggcgcccgtctcaccatcgaggctgccgatgacagcgttgaccacgccggctatgaccccgagctctaccccgtgacggtggagtatctggtgacggatcagcgctatacctccgacaagataggcgatcttgccgatcagttccggccctatcccggcaaggccgtggccctgccggacgatcagaccagcatcgtctatgccaagatcaccgactgggcgggcaatgtcacctacctcagcaccgatgacctgacggtggacgccaccgccccggagatctcctccgatgtggccgagaaccaaatttactgccaggacggtctccgcatcgccttccgggatgaccatctcaagagcgtcaccctcaacggcacggagatgacctacgccgccgaggacggctggtatgtcctccgcctcagcgccggctccggcgctcaggagggacagcagaccctgaccgtcaccgacgaggccggcaacggcaccaccgttcacttccagtggtacgccggtcacagctttgacgataccggcctgtgcagtcactgcggtcttcaggcagaggcccggtggaacgacgttttcttcccgcatctggaggatgcgctgacctccgccgatgccgccgaggacggcgcccgtttcacggcggtggtcatgctgaccaatgtctctctgcctgccgatgccttctctctggacggcataagagccgtgctggcgctggagggccacaccctgaccctgtcggctcccatgacgctggagcagagctccggcaacctcaccatccgtgacagcaccagctccggcaggatcaccggtcaggcactgacggtaaaggacggccgcctgacggtggaggccggctgctttgaaaacacgctggaccttcaggactgcaacgtgaccctcttcggcggcaccttcgcccgcattacgtcggaggatgccgcatatccccgtgcagctctggcctccggcactgcctatcagcaggcggacggccagctgatccgccgcagtgacatcacgcccacgctggaaaatgtcgccgtggtctcctgcccccacgatgagatcgacggcatcacctgccgcatctgcggcaccaagatggtggccaaggtggctaaggatgataccctccgctacttcgccgactttgaggacgctgcccagtatgccgcaacgctggagggctccgccatcaccctgctgagggatgccatctggggcagcatgggcctccccaccggcacctatacgctggatctcaacggcaagaccctctccggctccaacgatctgatgatcgatggcagctttaccatctgcgacagtcagggtggtggtaagctgtggcgggacggcaccatttgggtgctgggcggccatgtcgccatcaccggcggccagttcaaccgggtgtatctggcctccgacaacgctgatctgtccgtcaccggcggcaccttcgcccgcatcgcttacagcggcgaggatacctcccgcacgcctctgttcttcccggcggagggctataccttccaaaaggccgacggcaactacgccaataccggtgacgtggtcatggaggaaaatctccgctatctggaggacgtcaccgtcaccacacctcccttcaccatcacccgttaccccgtggacacggacctctatcccaccacccccgtcggctatcggccggacttcgtcacggaggtcaccttccacatccccgagagtgaccccaccatcgaattccagtggtatcaggtgggcgatcccgaccggatcaagagctacggcagtgcattggtctggcagaaccccttcaccctctacaccttcatcgacggaccggcccagtactacggcatcttctcctacaagggctattccgtccgcaccgacgttctgaccgtacgggaactggtctgtgaccaccccggcgtggatgccgacaatcggtgcagccagtgccgtgcggaggtagccgcctccgtggagctgaacggctccaccggctactacctgtccctgtcggaggctctggcgttggcccggaccgatgcctaccgtggctgcaccctcacgatcctccgcagcagcaccgatcccatctccgtcaatagcggctccttcacgctgacggcggcgcagggcgtgatgctgggcggcaaggtgacgctggccaaggatgccgccgtcaccctctccggcggcagctacaccaactccgccagcatcttcgggcccaaccgcatcgaaggcggcaccttctacggtgccgtggccctgcaggacggctcctccgtctccggcggcagcttcctcggcgccgtcaccatctccgacaccgtgaccgttaccggcggtaccttcaccggtgatgtcaccatcgaccatggcggcaagctggtcgccagcgccggcaccttcggcagcgtcaccgtccagtccggcggaggcggcgctctcaccggcggccacttcggcgagatcacgcagagcaatggcagcctctgcgccgcccttctggcggagggctatgcctattccgacggcggcatcatcaacggctatgtccccatggtcggtggcgtggacgtggtcccccatgcccagcaccagtacgtctggctgaaccagaagctgctgtgcgactgcggccatgtggcagatgaggacgccgacgccccggtcatcaccggcatcaccgacggtgagacctattacagtgacgtgaccttcaccgtcaccgacgcccatgacttcaccgtcacggtggacggccagcccgccaccgccgagggcagcctgtataccctccccgccgacaacgtctcccacgagatcgtggccgtagacgtggccggcaaccgcaccactgtcacggtgtcggtgtatcgggtctataccgtgacaccgcccaccggcacaggcttcaccttcaccggcgagaccaccgtccgccacggacaggattaccggttccgggtggatatcgcccccggctactccaagctgccggattactccctgctggtcaacggccagacccccggcggcatgggcgatgtggacttcgacgagtgcctgatccccagcgtggagggcgacctgaccatcaccgtcaccggcgtggcggatatcaccccgccggaggcggagctgaccatcgccgggaatccctttcgccagttcctgaacaccgtcaccttcggcctgttcttcaagagcacccagaccgtgacggtaacggtctccgacctgggcagcggcgtggacacggcggcatggatgctgtctgacaccgtctttgccggtcaggacgccatcaccggcagctggacggctctgtccctcaccgacggcagcggcaacttctccatccagcccggccagaagggctatgcgtacctgcgggtcacggaccgggccgggaacatcaccgttctgaactccgacggcgtggtggtctacaccgacgctcaggcggatacccggcagatcacctatgttaagcgcagcggacaggatgtctccttccacgtcgccctcaacggcaacaccgtcaccggcgtgcagctggcggacggcacgcctctggcgggcttcaccgccgccgaggacggcaccgtgaccctgcctgccgccacgctgcaggcgctggccgccggggactacaccctgtacgtcacctacgcccccttgggcgtggcctacaacgcccgctacgaggccagcgaggcaccggccatgacctccgtggccctgtccgtccggaaggccgagggcagcgtcgccattctggatgacgtgagccgtgactacaacggccagccggtggaagctcccgccatcacctctctcggaaccggcgctctcacggtggaataccaggcgcagggcggcgagttcaccacgcaggcccccaaggctgtgggcagctacaccgtccgggtcacggcggcggccgacgatgattacgcctccgccagcgcccagcggaacttccgcatcaccgccaagcgtgtcaccatcgacggcgtcaccgtggagccctccaagacctatgacggcaccaccgacgccaccatcgtgacgggcggcaccctcagcgccaacttcgacggcaatgacctccgcatcgtcaccggctctgccgcctacgacggcaagaacgtcggcaccggcaagaccgtctccttctccggcttctcgctggagggcgacgccgccgaaaactacactctggcttcccagcctgtcggcaccacggcggacatcaccgtccggacggtaacggtggaggacctgcacattcaggataagctctacgacggcacggatcgggcggagtacgacggtgagcccaccctgggcaacgccgtgtccggcgaccatgtggcgctggtgaaggggactccctccttcacctccatccggacggcagaggacatcgccattcgtttcaccgagttctccctcaccggcgctgacgccgggaactacgccctgacccagcccaccggcattactgcctccatcctcccctacgccctcaccggcggcgagtatgccgtcaactccaacgactggatcaaccacgacttcgtggtgacggcggcggagggctatctcctgtccctgacggacaccgccgacggcgtgtggcagcagaccctgcgggccaccgacgagacggcggagggccggctgaccttctatgtgaaggatctgaccaccggcgccatctcccttcaggtgacggagcagtaccgcatcgaccgtacccagcccaccggcgagatccgggtggacgagcggacggtctggcagtccttcctgtccaggatcaccttcgacctcttctatcgggaggagcaggctgtggtcatcgcctctgccgacgagaccagcggcgtggcggccacggagtatctgctgagcgccgaggatctggacatcccggcgctggagcaggagaccttcctgccctatgaaaaggcgctggcgctggctccggacggccagtatgtggtctatgcccgcatcaccgaccgggcgggcaacgtcacctgcctccgctccgacggcatggtgctggacgccacggcccccgccatcaccggggctgaaaacggcggcgtgtactgcgccgcagtgaccctgaccatcaccgacgcataccccgtcaccgtcaccgtaaacggcactcccgtggagctgacggagggccggctggcgctccggcccgccgaggggacgcagctggtgacggccaccgatctcgccggcaacgagtcccggctggagatcaccgtcaacgacggccatacctggggcgactggagctccaacggcgacgacacccacacccgcacctgcaccatctccggctgcggcgcttcggaaaccgagagctgcaccggcggcgaggccacttgcgtggaccgagccgtgtgtgaggtctgcggcggggcctacggcgacgtggacgcccatcgtcacgccgatctgcgccatgtggaggccaaggccgccaccacggaggcccccggcaacatcgagtactggtactgcgccgcctgcggcaagtattttgccgacgctcaggccagccgtgagctccggcaggcggacaccgtcaccgagaagctgcctgccgcccccaccggggacgaagcacccctgacgctgtgggtgatcgtgctggcagcctgcgccggtctggcgctcctgccgctggtgctccggcggagaaacagccaccgcaccgcataa

SEQ ID NO: 2343 - DNA, 1683 bp, Oscillibacter sp.
atggaaaaccgtagtaaggcgatccttggcatggaggacagcgcatttgcccgctcactgttcaagtccatgggctacacggacagcgaactgaaggagggcaagcccctgatcggcattgccaacacctggaacacgctggttcccggccactacaatctggacaaggtggctgagtatgtgaagaacggcatctatgccgccggcggcaccgctgtggagttcggcaccatcgctgcctgcgatggtgtggcacagggccatgagggtatgcactacattctgccctcccgtgagatcatctgtgactccgtggagatcatggcgcaggcccaccggctggacggtctggtgctgctggcctcctgcgataagatcgtgcctgccatgctgatggcggcggctcgtctggatatcccctgcattgtctgcgtgggcggtcccatgctgggcggcatcgagttcgacggccgtaagtccgacctgacctccatctccgaggccctgggtatgctgaaggccggtaagatcaccgagtgcgagtacaactctctggagaacaccgcctgtcccggctgcggctcctgttccttccttggcaccgccaacaccatgtgctgcgtgtccgaggcactgggcatgaccctgcccggcggcgctctgatccccgctgcttacgctggccgtctgcgccactccttcgagtccggccgtgccatcgtggagctgtgcaggaagggcatcaccgcccgccagatcctcaccaaggaggccatccgcaacgccatcaaggtgaccatggccatctgcggctccaccaacgccgtgctgcatctgcccgccattgccaacgaggcggagctggatatgaacgtgctggaggagttcgaggctctcaccaagaccacaccccagatcgccaaggtcaatcccgctgccaagccggagatggaggcattctaccgggccggcggtatcccccgtgtcatgcagcatctgggcggcctgctggatacctccgtcatgaccgtcagcggcaagacgctggccgagaatctggccggctacgtctacgagtatccggaggatcccaccatcatcaagacggtggaggagcccttctccaagaccggcggtgtggccgttctgcacggcaacctctgtccccgtaccgccgtgtccaagcccggcgccatcgatccctccatgcaccgctttgtgggtaaggccaagtgctacaacagcgaggaggaggccgaggaggccatcctgggcggcaagatccaggccggcgacgtggtggttatccgctacgagggtcccaagggcggccccggtatgcgtgagatgttcaaggccatgaagtatatgtacggcgtgggcctgagcaagtccgctgccctgatcaccgacggccggttctccggcaccaacaacggctgcttcgtgggccatatctccccggaggctgccgagggcggtcctctggccatcgttcacgacggcgacgagatcctcatcgacgtggatgagggcgttctggagctgcacgtctccgacgaggagatcgctgagcgctacaagacactggaactgcccaagaagaacatccccaacggctatctgcggctgtatgccaaggtggctgcctctgccgacgagggcgctatcatcaaggcgtaa

SEQ ID NO: 2344 - DNA, 1944 bp, Oscillibacter sp.
atggcagaggtaagagtagccaaaagcgccggtttctgttacggcgtggagcgggctgtgaagctggcggaggagacagcccgtgaaaagggcggctgcgccatgctgggcagcatcatccacaacgtccatgtggtggcggagctggaggcgctgggggccagacaggtggactccgtggaggaggtccgccccggcgagacggtgatcatccgctcccacggggagcgcaaggaggtctttgaccggctggagcagctgggagccgtgtgtgtcaacgccacctgtcccaacgtgctgcggatccagcagctggtggcgcaggccgaccgggaggggcgtatcccccttatcattggggagcctcggcatccggaggtcatgggtgtggccagctggtcggatcgcagcgtcatctttccggggccggaagaacttgaaaaatggctcctgcaggagccttcccggcagtctctgtccctgacggcggtggctcagaccacctgcatccgaacaatttgggaaacttccaaagaaattttaaaaaaactgtgtacaaacgcaaaaatctttgatacaatatgtagcgctacgcataggcgtcagttggaggcagccgaattggcggctcaggctgacgtaatggtcgtggtcggagatcgtaaaagtgccaacacgaagcatttagcggagatctgccgtaaggcttgccctgtcgtgtatcagatcgaacaggcgggggagctgacgacgggctttctttccggatgcacaatggcggggcttacggccggcgcgtccaccccggcgggcatcattaaggaggtatatacaacaatgagcgaagaaatcaagaacatggaaccccaggaagagagctttgaggaactgctggacaaatcctttaagactttaaatacaggagagaaggtaaccggtatcgtgacggccgtgggtcccaccgaggttcaggtggatctgggctgcaagcaggcaggctatatttccgcggaggagctgtccgccgatcccagcgtgaagcctgaggacgtggtgaaggtgggtgacgagatcgagacctacatcatccgtgtcaacgacgtggagggctacgctatgctctccaagaagcgtctggacgccgtgaaggtctgggaggatatcgctgaggcctgcgagaacaaaaccactcttgagggcaaggtcaccgaggagaacaagggcggcatcgtcgtcaacgtcaagggcgtgcgtgtgttcgttcccgcctctcagagcggtcagccccgtggtgccgatctgagccagatgatcggccagaccgtctccctgcggatcaccgaggtcaatcgcgcccgccgccgtgtggtgggttccatccgtgccgtgcagtatgaggagcgtcaggctgctcaggccgccatctgggagagcatcgaggtgggtaagcactataccggcaccgtcaagtccatgaccagctatggcgtgtttgtggacatcggcggcgtggacggcatggtacatatctccgagctgtcctggtcccgcatcaagaaccccgctgaggtggtttctgtgggcgacacgctggatgtgtacgtcatctccttcgatcccgagaagcacaagatctctctgggtgtgaaggaccgttcctgcaatccttgggacaagttcatggagacctacaaggtgggcgacgtggcttccgtccgtatcgtgaagctgatgaccttcggtgctttcgctgaggtcgttcccggtgtggatggcctgatccacatctcccagatcgccgatcgccgcatcgagaagcccggtgacgttctgtccgagggccagatcgtggatgccaagatcaccgctgtggatgaggagaagcaaaagatctccctgtccatccgtgctctgctgaacgacggggacgaggacgccgagtaa

SEQ ID NO: 2345 - DNA, 2493 bp, Oscillibacter sp.
atgagtaagaaaccccaatacgatcccgaggagatccgcttcccggaccagcacatcgtcgagcgctcactggtgccggagatggagaagtcctacatcgaatacgccatgtccgttatcgtgggccgggcgctgcccgacgtgcgggacggcctgaagcccgtccaccggcgtattctctacgccatgtacgaggacaacctcaccagcgaccgcccctttaagaagtccgccacctgcgtgggcgacgtgctgggccggtatcacccccacggcgacgcctccgtctacgacgctctggtgcgtctggcgcaggatttctccatgcgctatatgctggtggacggccacggcaacttcggctccgtggatggcgatccccccgctgcctaccgttatacggaggcccgtctttccaaaatttccaatgaaatgctgcgggatatccggaaggacaccgtggactgggaccccaactttgacgagagccgcaaggaaccccgtgtgctgcccagccgcttccccaacctgctggtcaacggctcctccggcatcgccgtgggcatggccaccaacatcccgccccacaacctgcgggaggtcatcggagcctgcatccacgtgctggatgatcccgatgccacgctggcggacctaatgacctatatcaagggtcccgacttccccacccgtggccttatcatgggacgcagcggcatccgggccgcctacgccaccggccgtggccgggtggtgatgcgggcccgccacgagttcgaggagttcggccacgaccgcacccgcatcatcatcacggagctgccgtatcaggtgaataagcggatgctcatcaagagcatggccgatcaggtggaggacaagcgtctggagggcatctctgacatccgggacgagacggaccgcaacggtatgcggatcgtcatcgagctgaagcgggacgccaatccgcaggtggtactcaaccgcctgtttgcacagacccagctgcaaaccaccttcgccatcaacatgctggcgctggtgaataaccagtcccagccgaagatcctctccctgcgccacatcatcgacgaatatctggcctttcaggaggagatcatcgtccgccgcacccgctatgacctgaaggacgcacaggcccgtgctcatctgctggagggtctgcttatcgcacaggacaacatcgacaaggtcatccacatcatccgcaccagctatgacaacgccaaggagaacctcatgtcccgcttctggctggacgatgtgcaggcacaggccattctggatatgcgcctgaaggcgctgcaggggctggaccgggagaagctgcaggcggagtacagggagctggaggagaagatcgcctacttcctgaaggtgctgtccgacgatgctctggtgcgctccatcctgaaggaggaactgtccgccattgccgagaagtacggcgatgaccgcaagacggaaattcaggacgtggaggacgagatcgacatcgaggacctcatcgaggaggaggagtgcgtctttaccctgacggagaacggctacatcaagcgcaccgccgtcagcgagtacgccgcccagagcaagggcggcatgggcaagaagggtatcaccacccgtgacgaggataccgtggtggatgtgttcaccgcctccacccacgactatctcctgttcttcaccgataccggcaaggtctaccgcaagaagggctaccagatcccggagagcggcaagaccgccagaggcaccaacatcgtcaatatcctgcaggtggagcagggggagaggatccagaccatgctccactaccgggaggccggggagggccagctgtacctcttcatgaccacccgtaacggtacggtgaagcgcctgccggtggagacgctgaagaatctccgcaacaacggcatccgggcgctgacgctggacgagggcgacgagctcatcaacgtgcaggagaccgacggcagccagcgcatcctcattgccacccacgacggtcaggcggtgtgcttcgacgagacggacgtgcgtgccatgggccgcaccgccgtgggcgtccggggcatccgcctgcgggagggggactatgtggtgggcgccgccaaggccgaggccggcaagacggtactctccatcacggagcgtggctacggcaagcgcaccccggtggaggagtaccgcatcaccagccgtggcggtctcggcatccgcaactacatggtcacggaaaagaccggccccattgtgggtatcaaggtggtggacggacaggaggacctgctgctgatgacgcaggcgggtatcctgatccgcacggcggtggacagcatccgcatcgccggccgggccacgcagggcgttatcgtcatgcgctttaaggaggagggcgaccacgtcatctccatggcgctggcggaccgggaggcggagaaggaagccgccccggcagaggaataa

SEQ ID NO: 2346 - DNA, 1578 bp, Oscillibacter sp.
atgcgggccggcatctctgaagtaaggagaaatattatgacttccaaacgaatacacagcgacgcctccggcagccgccgtatggcgtggatggactggttcggccttattgcgctgggactgctgatggtgtgcagtctggtgctgctgggccagctcctgaatctggatatgctggacaacaaatatctgctgctgctgatggcgggcatcctgatcctcaatagcggccacgccgtggtgcagctgccccgccgcccctccaagggtggtcatgccgccaagatcggctgcggcgtgctggctgtgatcctgtccgccggaatgatctacggcgccgtggccggcggcagtctcaaaagtgccgtcacccgcatcgtgggcaagatggcggagaagcagaccatcgacatcatcgtcctgaaggacaacgaggccagctccatcgaggatgccgtgggctataccttcggtgtgctggaaaacgccgatcaggagaacaccgccgaggtgctcaaaaccctgtccgatctgaatcccacctccaaggcctacgcctctgtgccccagctggcggacgctctgtatgacggcgaggtggatgccattatccttaacgacggctatctgcccattctggagcagacggagggctatacggatttcgacagctacacccgtatcctcaagcagttcgacttcaccaaggaggtcgccccggtggtacccaacgagtccatcaccgtggagcccttcgtggtctattgcagcggcatcgatgcccggaactccgatgtcaacatccagagcctcagtgacgtgaacattttggcggtggtgaatcccaagtcccggcagatcctgctgctaaataccccccgtgactacttcctgcccctgagcttcaacggccaactggataaactgacccacgccggtatgtacggcatcgacgagtccatgcgggtgctggacaatctctacggtgtggaaacgcagtactacgcccgtgtcaacttctacggcctgaccaagatcgtggacgctctgggcggcgtagacgtctactccgagcagaccttcaccaccaaggtcatgcagatccccgataagaacggtaatctctatgacgactacttctccttcaccgaggggatgaactacaacgtggacgggcaggcggctctggctttctgccgggagcgctactccttctctgacggtgacaaccagcgtggccgcaaccagatggccatgatcaaggccatcttcaacaaggctacctcctccgccattctcaccaagtatgatgaggtactcaaggccgtggcggacaccatgatcaccaatatgccctatgaggacatcagcagtctggtaaaaatgcagctgtcggatatgtccggctggaacatcaccagctactccgtcaccggctacggcggcacggaggagtgctactccatgcccggtcaggccctgtgggtcatgtggcccgactatgacacggtaaacgtggccaaggatctcattgcacaagtcatggcaggtcagacccccgtcatccccgaagattaa

SEQ ID NO: 2347 - DNA, 1815 bp, Oscillibacter sp.
gtgggccagcaggaagcggctcccatcctgttggacggtctgcgccgtctggagtaccggggctacgactcggcgggcatcgccgtgtgcggcgatgggcagctgcgggtgaagaagtcccgtggccggctgcaggtgctcagcgatctgacccacgacggggcggatctgccgggccatctgggcatcggtcacacccgctgggccacccacggggagcccaacgacatcaacgcccacccccatgtgagccagagtggccgcatcgccgtggtacacaacggcattatcgaaaactacgccgagctgaaggagcagctgctccacaagggctacggcttccggtccgagacggacacggaggtggtagcccagctgctggactactactatgccgactgcggcgacatctttgaggccatgatccggatgctccacgccgtggacggggcctatgctctgggcatcatctgcgccgactacccggaccgcctgctgtgcgcccggaaggatgcgccgctgctgctgggcttcggtgagggggagaacatgatcgcctccgacgtgacggccatcatccgccacacacgggacatcgcctatctggacgacggcgagctggccattctcagtgctaagggcatccgggtatacgacagccagatgcgccccatcgagaaggaacaccgccatgtggactgggacgtggccgccgccgagaagggcgggtacgagcacttcatgctcaaggagatccacgagcagccccgtgccatccgggaggccactgccgcccgcatccaaggtggtcaggtggtgctgcgggacctgaacatgacggatcagcagatccgggacatcaacaagatcttcattgtggcctgcggatcgtcgtaccacgtggggatggtgggcaagtacaatctggagcggatgctgcggcgcagcgtggaggtgtgtctcgcctccgagttccggtacagcgatcccatcgtgggcaagggcgatctggtcatcgtcatcagccagtccggcgagacgctggacaccatggcggccctgcgggaggccaagcgccggggtgcccacatcctgagcatcgttaacgtggtaggctcctctatcgcacgggaatcccatacggtgctctatacgtgggccgggccggagatcgccgtggccactaccaaggcatacagcacccagatggcggtgctgaatctgctgggactgtatttcagtcaggtcatgggtacgctggatcacgaggtgtacagcgctatggttcgaggcatcgaaaagctgccggagcagatggagcgtattctggagcaggcggagcacatccacgacatcgccaagcgctgcgccggccgagaggatgtgttcttcatcggtcggaatctggactacgccctgtcgctggaggggagcctgaagctcaaggagatcagctatatccactctgaggcctacgcctccggcgagctgaagcatggcaccatttccctcattgaggatggcacgctggtcattgcgctggggacatataccccgctgtttgacaaggccatgagcaatgtggtggaggtacaggcccgtggcgcacaggtactggccctgaccactgagagccatgccggggagatgggcaagcgtgtgccgatgctgatgaccattcccgacaccgaggaaatgctgctgccccagctgggcgtggtgccgctgcagctgctgagctactacattgcgctggagcgtggctgcgacatcgacaagccccggaatctggccaagagcgtcacggtggagtaa

SEQ ID NO: 2348 - DNA, 1941 bp, Oscillibacter sp.
atgagtgagacggtacagatcaaggccccgtggctggcatccaaggatcccgaggtcccctctaccctgagctactccaccctgtccatgtgcggccgggtcgaggagatggtacgtcagtaccccaattacattgcctatgagttcatgggcaaaaccaccacctacgccgagatgtggcagaagatcaacgcctgtgccaagagcctgaaggccatcggtatccgggagggtgacaaggtcaccatctgtatgcccaacgcccctcagaccctgtgtatgttctacgccgtgaacatggtgggcgccatcgccaacatggtccaccctctgtccgccgagagcgagatctccttctatctgcgggactccaactccgtggcggccatcacgctggatcagttctaccccaagtttgaaagcgtccgcaagacggtggatctgccctgcctcatcgtcacctccgtggccgatgagctcaagcccctgctgcgggtgggctatcagctcaccgagggccgcaagaaccccaaggtcccccgtggccccggcgtggtgctgtggaaggatttcctgaagcgtggcgagcacgtggagatctaccgcatcaagcgcaaggacaccgatcccgccgccatcctctactccggcggcaccaccggcgtcaccaagggcatcctgctctccaaccgcaactttaacgctctggccgcccagatcgtggccaccaaccccttcttccatccgggtcacaagatgctggccatcatgcccatgttccacggcttcggactgggcgtgtccatccactccatggtggccaacggcggccactgcatcctgatcccccgcttcacccctcagagctacgccgagctcatcaagaagcacaagcccaatctcatcgccggcgtcccctccctgttcgaggcgctgctgcgggtcaaggagatcgaaggcgccgacctcagctgcctgaagggtgtgttctccggcggcgacagtctgtccattgagctgaagaagcgctttgacaagttcctccacgaccacggcgccaccgtcagcgtccgggagggctacggcaccaccgagtgcgtcaccgccagctgcctgacccccatccacaagcagaaggagggctccatcggcatccccttcccggacacctattacaagatcgtcaagcccggcactcaggaggaggtcccctacggtgaggagggcgagatctgcctgtccggccccaccgtgatgctggagtacgtcaaccatccggaggagacggcccagaccaagcagacccacgccgacggccttgcctggatccacaccggcgacctgggcatgatggacgaggatggcttcatctacttccgtcagcgcatcaagcgcatgatcgtcaccaacggctacaacgtctatccctcccagttggagaatattctggatggccacgactacgtccacctcagctgcgtcatcggcgtcaaggaccccatcaagatgcagcgggtcaaggcattcgtggtgctcaagcccggctatcagcccacggaggcctgcaagaaggagctgctggactactgccgcaagcacatcgccaagtacgccatgccctccgacatcgagttccgtgaggagctgcccaagacactggtgggcaaggtggcctaccgtgtgctggaggaggaagagaacgccaagcaggctcagaaggccgtagaggacgctaagcgtgccgaggaggatgccaagcgggccgaggcggagaaggccgagaagctcagtgccgccaagaagcctgcggccaagaagcctgcggccaaaaagcccgcccctaagaagcccgctcaccccacggccaagtccgagcccgccaagcaggctcagaaggccgacacccctcatgacggccagaacaacgacatcaaagaatag

SEQ ID NO: 2349 - DNA, 1257 bp, Oscillibacter sp.
atgaagaagaatgatgccagccgtaaggcgctgcggatcatcggttccatcctggtggcgatcgctctgtggatctatgtggataccgtcacctcgccggaggtgacgctgaaggtgaaaaatgtgccggtggaattctccggcgaggataccacactggcagatcgtggcctgatgctgctgtcgggctatgataccaccgtggatctggtcatcaagggtccccggaacgagctgcgtaagctggaccgcagcaagatccggatcgtggccaataccagcaatatcaaggaggccggcagccagaccctgacttacgaggtggtgtttccggacaacatccgcagagggaagctgacggtggattctgccagcatttacagcatcaccgtcaccgtgggcgagttggacagcaaggaagtacccattcagtgcgaaattgtgggcagcgtggctgacggctacatggccggggagctgacgctggatccggaggtgctgctgctgcgcggccagcgggacgacctgctgaatgtcagctacgccaaggtgcggctggatatcaccggagctgacaagacggtggtgcaggcgctggaatttgagctgtacgaccacaacgatgtgaagatcgagaacagcgccatccgcagcagtgaaaagctcatcggcgccaccatgccggtgtcgacggtgaaggaggtgcctctgcgggtgaactttgtggaggccgtgggggccaccatggagacggtggactacaccatctctcccgccacggtgaagctggtgggcgagaaggcccgactggatgagatcgacagcatcgtgctggataccctgtatgtgcaggatctggaggattcccagagtctgacctataccatccccgtgccggaggatgtgaccattgccgacggcgtggacaccgccaccgtgacggtggtggtccgtggcgtcacggagcggacgctgaccgtttcccggttcacctttgagaatgtgccggagggcatgaccgccacggcagagacggagtcgctgaacgtgcggctgcggggcctgacagcggaggtgaacgccctgacggcggagaacgtccacatcgtggcagacctgtccggactcaccggcgcaggggtccatacggtgccggtgaccatccgcatcgagggctacgagaatatcggcatcaagggctcgtatcagatggtggtggatctgaaggtggcttcggacaccccgacagagccatag

SEQ ID NO: 2350 - DNA, 1377 bp, Oscillibacter sp.
ttggataaatttttttcaaatacagagatagagatccatcaggggaaaggggcgctttcattgaattccatttctgacgtatggcagagcgtactaagccgattacaggagcagctcagcgagaccaccatccgcacatggttcgacgaggtggacgtggtcaccatggaggactccgccttcgtgctgcattgcagcaactccttcaaaaaaagcaccatcgagacccgtttcatgaagcacatcaaggcggcgctgaaggacatcttctcctccgatctggaggtgaaaatcctcaacgacgagcagctggctgcttatcacggtgtggccccggatcagcccggctccctgctggattccgacgccttcaccttcgagacgtatgtggtggggccgcagaacaagctggcctatgcggcggcacgggccgtggcggataagccggcggaaaacttcaaccctctgttcatctacggcgactccggactgggcaagacccatctgctctacgccatcgcccatcaggtcaagcgcaagcgggaggacctgcggatcgtatacatcaagggcgacgacttcaccaacgagctgatcgcatccatccgggagggcagcaacgccgagttccgggagaagtaccggcaggcgggcatcctgctggtggacgatatccagttcatcgccggcaagaagcagactcaggaggagttctttcataccttcaacactctgtacgaatccgggcggcagatcgtgctgacctccgaccgtccgccccgtgaaatgacccagctggaggaccggctgcaaagccgcttcgtgtcgggccttatggtggatgtggcccctcccgacttcgagacgagactggccatcatcaagaacaaggccgccatgctgggggtaaagctccccgacgagatctacggctacatcgccgagaacgtcaccgccaacgtgcggcagatcgaggggaccctgaataagctgctggcctaccgggatctgctgggggatcaggtggacgagcagtccgtgggccgtgccgtccgggatatgctgcaaaagagcaacgagtacatcccctcgccgtcggtgatcatcagctatatctgcaagtatttcagcgtggaggaggatgtgctccgtggccagcgccggggccgcaacgaggtcaacgcccggcagatcgccatgtacctcatccgccgcatgaccaatctctccctcaacgacatcggcaaggaatttggtgaccgggaccacaccacggtgctgcactcgctggataaggtagagaagcagatgcgtaccgaccccgcctttgccgaggtggtgaaggagatcaccaccaacatcaacgccaagcgctga

SEQ ID NO: 2351 - DNA, 1923 bp, unclassified Ruminococcaceae
gcaaaaggtaaagatcattttatccttgccctgtatttgctgttcaaaaaacgaatcggagcgttaaaaacgtctccagtaaaggaaggtataactatgtgcggaatcgtaggttatgccggcaaccgggactcttccactgttttggttgacggtttgaaaaaattggaatatcggggatatgactctgccggaatcgctgttttcgaagataatgtcatcaaagtagttaaggcaaaggggcggctggcagatttagaagaaaaaatgaaagaggtcggtaaaccgcaagggcactgcggtatcgggcatacccgttgggctacccacggtgagccgtccgatataaactcccacccccacggcagcaaaacactttctatcgtacacaacggaattattgaaaactatctggaattaaaggaaaagctgctcagaaaaggatatacctttttatccgaaaccgataccgaagtggtagccaaactacttgactactattataaaggcgaccctatcggcgctgttttgcgggttatccaagcagtgaaaggctcttatgccctcggaatcatcttcaaggattttccggataaaatctttgccgtacgcaaagacagtccgttgattgtcggattgggagagggtgaaaactttatcgcgtcagacataccggcaatcttaaaatataccaaaaaatactatttgattgacgaaaatgaaattgtggaactggacaaagatcatgtgtcaatcttcaacctggaccgcgaaaaaattcaaaaagagatttttactgcggactgggatatggaagctgccgaaaaaggcggttatcctcatttcatgctcaaagagatttttgagcagccggacgcccttcgaaaaacagtgtccccccgtatccatgacggatcgcccgcgctcgagctcggcgctctgtctgacgaatttattaaaaatatctctaaaatacatgttgttgcctgcggcaccgcaatgcatgcaggtttggtcggcaaaaatctgatcgaggcaatcggcagaatcccggtagacgtcgctatcgcctccgaattccgatactgcaatccgattttaaataaaaacgacttgttaattatcgtttctcaatccggtgaaaccgccgacacgcttgccgcactccgccttgcgaaatcacaggggatacacacccttgcgctggtgaacgtagtaggctcttccatcgccagagaagcggataccgttctttatacctgggcgggccccgaaatcgctgtggcaagtaccaaagcgttcaccgttcagatgtcactgttttacctgcttgctttccaattcggtatgatccgcggcacactttctcaagaagaaaccgcggcttactgcaaaacattactggaaatgcctgaaaaaatgcaaaacctattggaaaactgcgacaaatgccaatattttgcctctaaattccagaatgcaagcgatctgttctttatcggcagaggactcgattacgccctttctcaggaaggctccttaaagctgaaggaaatttcatatattcacagtgaggcatatgctgccggagaattgaagcacggaacaatctccttaattaccgatcaggtaccggtaattgctcttgccacccaaaccagattatatgaaaaaatgctcagcaacatcaaagaggtcaccacgcgaggcgcaaaggtgctgctgattgccgacgaaaacttaatttcggaaaatgacagcaatgtggcaaaatatattctgcctatcccgtcggtaggcgatttattcatgccgttactggcaatcatcccgctgcaactgttcgcgtactacactgccgtactcagaggctgtgacgttgataaaccgagaaatctcgcaaaatcggtcaccgtggaataa

SEQ ID NO: 2352 - DNA, 2748 bp, unclassified Ruminococcaceae
atgcaatcatttagccgtaaagcaatgagatacaaacggggggcatttataattatggaaaaagtatactgtgtcatatcgcatacgcattgggatcgggaatggtataaaccgtttgaacagtttcggatgcagctggcggatttaatcaacaatcttttagggatattggaaaagtatccggaatatatttttcatctggatgcacagacgatagttttagaggactatttggaaatatatccggaaaagagagaagagctgagcaaatggatcaagcagggaaacattcttgtgggtccttggtatctgcagaatgatttttacctgacaagcggcgaggccaccgttagaaacttgatagaggggcaccgaattgccgagtcgtttggagcctgtgcagatgccggttatgctccggaccagtttggaaacatctctcagttaccgcagattcttaacgatttcggaattgataactttattttcggcagaggattcgaatgctatcataaggacgaaacaggcaaaatcgtcaccgaacagttgccgtccgagtttatatggcagggagcggacggaacgcaggctttggcgatacatatgaaatattggtacaacaatgcacagcgtttttcggaagatccgaagattgcgaaaaaactgattgaggttgtggaacgcagttttgaaggggtagcaatgacgccctatctgctgttgatgaacggcgtagatcatttggaagcacaggaaaatctgttgccgatcttggaaaagctgaatcaagacaagattaacggaacggttcgccagatcaaaatgactgattatgtggcaaacgtgcgcaattacattcaggaacatcaggttccgatgatgactcattacggcgaattgcggatgggcggagacggtcagctccttcagggaaccttgtcctcccgttcttatctgaaacggctgaacgtgcttgcgcaaaacaggctggataattgtctggagccgctgtattcgatgctggaaacggcaggttgtaccggctcttatccgaaaaattacctgcattatttgtggaaaaagctgatgcagaatcatccgcatgattctatttgcggatgtagccgggatgaaatccatgcgcacatggaggatcattatcaggccattcgtgaagtgaccgatgaactgcttcgccggggaatgattttggcggcacagcataatgcagccgcagtttcttacccggaggaatattctctggtggcggtaaataccttaggagtgccgcaaaacggtatgattgaagcggagctgattttccctgctgaagacaaagtagacggctttgcgatttatgacagcgaagggaaagaggtagaattctcattgatttcccgagagaaaggaccgatggatgtcttttctccgattaatctgccgggtattatagaggtggagcgttgccgggtatatttgtccgtgccggaaaccgcacctttctctatacagggttattctgtgcgaaaatgtgagaaacgtcccgttgcaatggcgttgacggaatcagctcaaccgatactggaaaatgatttcctacgggtagaagtgacgccggatggcagtattaccgtacaggacaaagaaaacggacgtaggctgacagactgtatttatttagaggataccggagacagaggagattcctatctgttccgacctgctcctgaagcaccacttgataccagaggcgtcaagccggagattacggtgctggagaagaacgcatatcttcaacgctgcaagctttcctggaactggagcattcctgcaagctttgattttgaccgtcattgccgcggcaccgagatggtcgaaatgccgatttccttgacgcttacgctgaaaaaaggagatcgtacgctggagattgcttatgacgtgacaaataccgcccgcgatcatcgtgtgagattggttgtggcggcagatatttgcagcaatcagtttcaagcggatatcccgttcgatatcattacccatgaagacggattccatcatccgaacaccatcagcttggtacacccgaacacctcttttgccgcaatggagcaggagggacgaggaatcgcggtgtttaccgaaggcaatcacgagtgtgagaaaatagatgaaagccggctggcatttaccctgttccgttctaccggagtaatcaatcgaaacggagacgacagcgtaaccagcggagatcagtggtattgcccggcaaatcagtgtctcagacgcatggaaggacggatgggcgtttacctatttgcaggtaagactgctgacgcaaaactgccgcatatggcatcgcgtttccgcaatccgctgctggtcacctttatgccctgcgaccgaagaaagttttcgggaggacgcacggcagtacaggacagcgctttggaagaactgttctatcgtcccgatccttatgcagatgttgcgatgcagagcaatcaatctgcagtgcaggtatcgggtgagcatatccagataactgcattaaagaaagcagaggacggaaaggggttggtgctccgtttcttccagtatggagatgccgatgaaaccgtaacagtgaccgcgaacggaaacatttatcggagcagcatgtcggaaaagcaggcagagctgttgggaaaagacgagattacgctgacggtgggaaccaagaagattgttaccctccgaatccaataa

SEQ ID NO: 2353 - DNA, 2100 bp, unclassified Ruminococcaceae
atgaaaaatccaatcggaatggatgacgtcccttatttttcatataagctggttgacaatggctcagatgaaaaattgacggcttatcaaatcattgttgatgacggaacaatgattatgtggaacagtggccgtgtaccaaaagacaaacagctccttattaaatacgatggaaagtctttaaaaccgcagactcgctatttctggcgggttttggcatggaataaccatggggagtgttcagaaagccaacaagcatattttgaaacaggactgatgcagccatttcaatgggaagcaaagtggatcacggcagatcctcaaggaattatggtaggaaataaaacaggctcccatacaacagctccatatatgcggcgtgaattttccgtcagtaaaccagttttcgatgcaacactgtatgtttcaggacttggatattatgagtgctatataaacgggaaatctgtaaaagataccgttctcgacccggcatttactgagtacgacaaagccgtaatgtatcgcacacataaggtgacaaatattgtgcagggaaataacgcgatcagcgttgttttgggcgacggattttataatgccgataccgatgacgtatggaatttcgtaaatgcggcatggcgtgatcattccaaatgtattctcatactttccataaaatatgaagacggaacaagggaagaaattgtttcagatcaatcctttaaaggcaccaaaggccctattcttgcaaatgacgtccgctcgcttgatcgatatgatgcaaggcttgaactgggcgattggacgatgccgaattatgatgattctgagtggaaagccgtcgccattacaagagccccgggcggcgaactgattgggcagtatacaacaccaatacgagtcgttgacgagtatctgccgaaaaaaattcagaaaatatcggatactacatggatggttgacgtcgggtttaatacaacaggctgggcagaaatatcaatgacggcagtgaaaggcacaaccgtcatgcttcgatacagcgaagattttgatgaaaacctggaacatatgcgtggaatatataattgtctaaaaaagtctgaaaaagaccattttcagacagattactatacagcaaaaggatgcggcattgagaaatggcatccgatatttaaatatcatggctttagatatatattggtaaaatgcgagacaggcattcctgcagacttcactgttaagattcaagaggtgagaacggatttagaaaaagcaggcgatttcacttgttcagatgataggattaatcaaatacaggaaatcacatgtcgtgcaacccgtaccaattttcataatatgcctaccgattgtccgcatcgcgagaaaaacgggtggacgggcgatgcacagctatcagcggaacagttgctttataattttaacggtgctgctgcatatgatagatggatggatgatgtagtccgtgcgcagagaaaaacggggcagcttccgggcattattccgtctgcgggctgggggttcaacggttgcaatggcccggcatgggacagtgtatgcgctgttattccttatcaaatgtatctttattgcggcgatacccgtgtgctccaaaaaatgtacccatgcttaaaaaagtatattgctttttgtgagacaatggcaacagacaacatatgtgaatttggattgggggactggtgtgctccctatgattcgtggcataagcagtgcgaagctgctgtaactgatacaggatattattatcatgatgtactgatcgcctcgaaaattgctgcagtgctgggatttgctaaggaagcagcgtgctatgctgaaaaagcggcagagatcagggattgttttcgcaatcattttattaagcgcgccgataccgaactggagctgaattgtaccaaatgtcaaacttcactgggatgcatgctttattttggtcttgtcaacgaggaggaaaagcaattgtttgttgacgagctaatgaaggaaattcacgctatgggcgaccattttgatgttggaatcctcggagcaaaatacgtctgcaatgcgctgatagaa

SEQ ID NO: 2354 - DNA, 2373 bp, unclassified Ruminococcaceae
atggatttataccagggagttacacgatttcatccggatcctgacagcggactgacgcgtaacgaggtggcggaaagaaaaaatcaagggcttgtcaacaaacagcagtctgatattacgaaatcgacgtggcagattgtgcgtgaaaacgtcttcactttatttaatgctttcaattttggaatcggcgtctgtattgcaatggtaggggcttataaaaatttgctttatttgggcgttattgtattaaatatattaatcggcattgtgcaggaattgcgttccaaaaaggtagtggaaaaattatcactgatatcggctccgcatgcctgtattttgcgcggaggaaaagagattaacgcgccggttgaagaattggttttggatgatattatgactctgcgtttgggaaatcaaatttgtgccgatgccgttgttgtttctggcgaagttgaggtggacgaatcgctgctgaccggtgaagccgatccggtgttaaaatcagtgggtgaatcgttaatgtccggcagtttcgtggtcagcggtacctgtcgagcgcaggtttttcatgttggttcagataattatgcgtcgaaaattactgctgaggcgaaaaaatataagaaagttaattctgttttattaaaatcgctgaaccaaattgtaaaattcaccggcgtttttgtaatgcctctgggcattttattggtattaaattccattttcctgctaaatgaaaccttaccggatactgtggtggcaaccgcatctgcactgctcgggatgatgccgaagggcttggtgttgttaaccagtgtatcgcttgcagtcggagtagtaaaacttgcaaagaaaaagacattggtgcaggatttatattgtatcgaaacattatcaagggtggatacgctctgcctcgataagaccggaaccatcaccgagggcagaatgacagtatccgacgtcatagaattagattcgaatcgcatgccgatatcggtggatacagcggcggctaattttattgcggctctggatgatgataatgccacctttgccgctctgaaaaagcgtttcggaagggaagaatcgttgcaggtgattcaaaaaacaccattttcttccgctagaaagtggagctcggtcacttttgaaaagataggcacgatattgttcggtgctcctgaaatattgctcaaaaatcaagattttcgtttgcctgctcggattcagacattggaaacagaaggatgccgcctgcttctaatggcttggaccgatactgaagtaaagggaatattaccggaaaagcgttatcccgtagcggtcattattttgcatgatccggtgcgcaaggatgccaaagccactctggacttttttcgaagtcaggatgtagaactgaagattatttcaggcgacaatccgatcacggtgtccagtattgcgaaacaggcaggatttcgaaaatatgattcttatttggatgcgtcaacgataaaaagcaaagaggagcttgctgcaattgcagacaaatatacgattttcggtagagtaacaccggaacaaaagcgtactttggtgcattcgctccagaatcaggggcatgtggttgcaatgaccggcgacggcgtcaacgatgtgcttgcgctcagagatgccgactgcagtattgcgatggcttcgggaagcgatgctgccagacaggtttctcagctggttttgttggaatccaatttttctgctttgccgaatgtagtcatggagggtaggcgagtcattaacaatattacccgtaccgcgtcgctgtttatggtgaaaacgatattttcctttttgttatcctttatggcgctgtttttccagatgccgtatccgcttatcccgattcagttaactttgatcggtgtggtggcagagggattgccgtcatttgtattagcactggagccgaatcatgaacgggtaaaaggcaatttccttcaaacaatattgggcagagcttttccgagcgcgctcatcattgtcatgtatttggttgcagtggatgtgctggctcctatattgggaatatccgaaccggaagccgttacattgggagtgtatttgaccggctttatttggctgatgcagttgtttgaagtatgtcgtccgtttaacaagcttcgtgctgtgctgtgggggagtatggcctcgggattcttccttttggcgtattttttgcgtgaaatttttagcttaggtactttatcttctgttacgcttccggtttttttggtaatggcagcgttgtgttatccgttgcagcttttattggaaaaaggcggcagaaagatgattcgccaatataggataaaacataaaaacaaatga

SEQ ID NO: 2355 - DNA, 1449 bp, unclassified Ruminococcaceae
ggctttggcagcttttatagatacggtttcattattaggaaagagggtggaattttggtaaatagaaaatggctgctaggactgcttcttttcgcagttttggttcagctgagcggctgctatcccggcaccggaacagataatttgctggttccgcctaagctgaccgctgagcaggataaaatttatcaggcgctcgaaaaaacggcgggcagcaacattaatctcagatatccgcagactggagaataccgatcttcctttgttttacgcaatattgatgatgagccgggtgatgaaaccattgtattttacaaaaccaatgtgaatacaaccaacccgacttctttaaaggtttctgttttagataaagacgatttgggaaactggtattgcgcttatgacatttccggcggcggcagcgatattcatcagttggagttttcttctttcggcgcgtttgatcaattgttcatgattgtaggctacaatcaggcgattgttgatacttcaaacaacaatgctgattctcaactgacagcatcccctcgacaagccagcaacgttttgcacatttactcataccgcagcggggagataaaagatctgttttcgcaggaatattctctgatgaaggttatggatattgacaacgacggatatcaggaaattgtcactattgttgattccaaaaccggcgatgaaccgtcggtgaacattatagaatataatgccggcattttttatatttcacagggagaaaccgtggcgatggacgattcggttctatcttatgttaatgtgcaaagcggttttatcggaaccaaccagtcagcgctttatctggatggagtaagagaggatggttcaacaacgactgaattgctgttttatcagaatggaacactgcaaagcgcacggctggaaaaaggagttgttgacagcattgatacccggaaagcagggaatatgtcaatggacgtagacagcgatgatgtcattgaaattcccgagctgcatctgatgcccggctatgagtggcccgaatacatggatgtacaagaatctgacaagctttatttcactcattggaaaattttttctaacggggcatttcaattaaaaaagatatcttattttaatatgggatttaattatttgtttgatattccggatcattggcaagataacgttactgcacgcaaagtggctgaggagaataagattgttttttattcctatgatcgtgacttgcagagtttgggtgaagaactgctcagcattaaggtggtaaacgaaaacagtaaggcagaaaccgaaaaagaggggtatcagcttattcgttacagcggacaactgtattattacgcaaaacttgcttatccggagaatctgtattatcaaattgattttgatacggtaagagaaaacttcaccctgctgaaatag

SEQ ID NO: 2356 - DNA, 1833 bp, unclassified Ruminococcaceae
atggctaaaattattggtattgacttaggtacaacaaactcttgtgttgctgttatggaaggcggcgaagcggtcgttattgcaaatgcggaaggcgccagaaccactccgtcagtagttgcatattctaaaacaggagaaagaatggtcggtcaggttgcaaaacgtcaggcaatcaccaatccggacagaacggtaagctctattaaacgtcatatgggtacagattataaagtaacgattgacggcaaggcatacactgcacaggaaatttcagcaatgattctgatgaaactgaaagcagacgctgaagcatatttgggtgaaaaagtgaccgatgcggttattaccgttccggcttacttctcagatgcgcaaagacaggctactaaggacgcaggaacgattgcaggattgaatgtacagcgtatcatcaacgagccgacagctgctgctctggcatacggcgtagataaagaggacgatcaaaaggttatggtttatgaccttggcggcggtactttcgatgtttccattattgagatgggcgacggagtacagcaggttttagctactgccggtaataaccgtttgggcggagatgatttcgaccagagagttattaactggatggtagatgaatttaaaaaagacagcggcgtagatttacaggcagataaaatggcaatgcagcgtctgaaagaggcagcagaaaaagcaaaaatcgagttatccggtatgaccagctcggcaatcaacctgccctatattaccgcagatgcgaccggtccgaagcatttggatttgactttgacccgtgcaaaattcaatgaattaacctctgatttggtagacgctaccatgggaccggtaaagcaggcaatgtctgacgccggattaaaaccgggtgatttgcataaagttttgatggttggcggttcctccagaattccggctgttcaggaagcagtgaaggcatacatgggcgtggagccgtttaagggtatcaatccggatgaatgtgttgcaatcggtgcagcaatccagggcggtgttttaaataaagaagtacagggcattctgttggtcgatgttacaccgttgtctctcggtgttgaggtgcagggcggcttgttcaacaagattattgaacgcaacaccaccattccggtaaagaaatctcagatttataccactgctgcagacaatcaaacttctgttgatgttcacatcttgcagggcgagcgggaatttgcaaaggacaataaaactttgggattgttcaaactggatggtattcctgctgcaatgcggggcgttccgcagattgaagtaacctttgatatcgactccaacggtatcgtacacgtatcggcaaaggatttaggtaccggcaaagaacagacggttaccattacttcaaacactaatatgtctaaagaagatatcgagaaggcagtaaaagaagcagaacagtttgctgaggcagacaaaaagctgcgggaagaaacagaagttaaaaacaatgctgatcagatgattttccagaccgagaaaaccatgaatgagctcggcgataaaatcacagagcaggaaaaagcggatatccagccgaaaattgatgcgctcaaagaagcactgaaaaacaataatattgaagaaatcaaggcaaaacaggaagaactgcaaaaagctttctatgagatttctgcaaaattgtatcaggctgcacaggcagaacaggcagctcagggcggcgcgcaggcaggtcctaccgtgaatgaggatggcactgttaacactgatgctactgaggttgatgacaacaaataa

SEQ ID NO: 2357 - DNA, 2565 bp, unclassified Ruminococcaceae
atgaaaaaggttatcacatctttattggctgcagcgatgatcggcagtacaatgctgggcgcgcttcctatggcaggggctgcttattccaacccggcggtagcagcgaataagaccgtcaacgaatccattacgtatgacggaaatctggaggagtggacaacagcagaaaaaaattatatgagtgtttaccaaaatgggacattgacattgtcaaatgaatattatgtttcatttaaatggtcggatgatcggctgtttatggcgatggttgttccggacggcggaaaaacagtaaacgggggtatccgcgactctgtgcgtatggcatttcgtctgccggacggaacggtaagttatttctatgtagataatgacggagatagcggttgggtacggtgtgcagatggaaccaccaatgtcctgagttggtgcggggacaaagacggtaccaccagtattctggatgccaataacaccggcgccaaatatgtatataaagatggcaaagcatacatagaagtcagcatgacgcttcaagaaagccgccgcacggcacttgtacagggcaataaaatcggagtagcggtacgttatcatgataacgctgcgtttaacgcagtagacggcgacaatattttagtatggggtgatgacgatctcgacttcaccaataactacgcagatactgcttctgttactccttatggagaagtgacattaggcacggtttatattccatacaccaaaccgtccgtcacagctaacaaggtggacaacgcttcggtcgcatatgacggaaatttggtagaatggggtactaccgaaaagagctatatgagtgtttatgaaaacgataccctaacagtatccgaggaatattacgtacaatttaaatggtcggatgatcggctgtttatggcgatggttgttccggatggcgggaaaacggtagacggcggtatccgtgactctgtgcgtatggcatttcgtttgccggacggaacggtaagttatttttatgtagacagtgacggagataacggttgggtacgaacggatgacaacaatcccaacaatgttttgagctggtgtggagacaaagacggtaccgtcagcatcctgggtaacaataacaccggcgccaaatatgtatataaagatggcaaagcgtacatcgaggtcagtacgacgttcagagaagagtatcgttctgctttgacgaagggcaatactatcggagtggcagtgcgttatcatgataacgctgcgtttaacgcgattaacggcgacaatattttggtatggggcgataatgaccttgactttaccactggcgctgccgactttggttctgtggtcttaggagacgctgtttcaagcggcggcaccgaccagggcgacggacataccacaccgctgggtgtcaataaagtcgatctgcaaaaaggatccgctatgatcgacggtatagaggatgtcatctggaaaaatgtagatttctttactcctgaaattgcgaataatttccaacatgctcccgctaactggggaccgaccgatacgaccggtaaatggaaagcaatgtgggatgacaaggggatttatttctgggtagaagttaccgattctactaagaatgttacttgcgaatcgggacagacttctgacaaggattctattatcgtgtatattgatcaaaacaatgatgacgacggaccttatggtgctgagaatccggcaaaaaccggagcttctccgttcttgatcggagcaaacggcgagtgcttcggctccgggaatggtatgatgcagggagctgacctcaatattgcaacaacggaaaccgaaaccggatatatttatgaaggctttatcggatggacgatttccgaaacagcgcaagcaggcaattatatcggtttggacattgatatcaatgataatattgatggaaatcaacgcggcgcggttgtgttctggaacacattaaatattgcctccggaaactggaatctgactaatggttatgcagatgcaaaactggtagacagcggcatgggagatacgccggaaataatagagaaaacaaccgatgcaaaagtcagcgaaccggaaacattgccggatgggacttcgaaacagattagttgggaagcaacaccggatgcatatgaatatcaaatcaatctattctcactgaatgattttgatccggatgaaaagttttttgtggcaacctataaagtgtatgatgaaacttcttttgcttttaccgatttggcattagatacttcttaccagttccaaattctcgcgtatgatgcattgggcgaattgcttgcggcatatgcgcccggagaattttccacaaaatttgaagatccgggtgaaaacaccgatccgggtgagaaccctgatcccgagaacccggacggcaacgatccatccatcgatactgataccccggcagaaaccggcgtggatttcagtatttggatgttgatgctgtttggcgccgccggtgcggtattgacagtgatcagaaagaaaagattgaattag

SEQ ID NO: 2358 - DNA, 2910 bp, unclassified Ruminococcaceae
atggaatttaatgtttttgaatctataaaaatcggcttggcatctccggaacaaatcagaagctggtcttacggcgaggtgaaaaagccggaaaccattaactaccgtacattgaaaccggaacgggatggtttgttctgcgaaagaattttcggtccgacaaaagactgggaatgtcattgcggtaaatataaaagattgcgttataaagggaaaatttgtgaccgctgcggtgttgaggttacccgcgctaaggttagaagagaacggatgggccatattgagttggctgctccggtttcccacatttggtattttaaaggaattccttcccgaatgggcttgattctggatatctctcccagacggttggaagaagttctttattttgcaaaatatattgttaccgaccccggaaacaccgtactggagaaaggacagcttttgtccgaaaaagagtacgctgatatgcgggaaaagtatgaagatgatttcaaagcgggtatgggagccgaagctatccaatatctgctgaaggaactggatcttgaaaaattgagtaccgagcttaagaccgagctggaaaccgttgccggtcagaaacgggttcggattctgaaacggttggaagttgtagaagcattccgtctttccggaaaccgtccggaatggatgattatggatgtggttccggtaattcctccggatatccgtccgatggtgcagttggacggcggacgtttcgccacttccgatttgaacgatctgtatcgccgtgtgattaaccggaacaaccgtttgaaacggttgctggagttaaatgctcccgatatcatcgtgcgtaatgaaaagagaatgctgcaggaagcagtggatgcgctgattgacaacggcagacggggacgtccggtcaccggaccgaacaatcgtccgttaaaatccttgtccgatatgctcaagggaaaacagggacgtttccgtcagaatctgctcggtaaacgtgtcgactactcgggacgttcggttatcgttgtcggccccgaactgaaaatgtatcagtgcggtttgccgaaagagatggcattggagctgtttaagccgtttgtcatgaagcggttggtggaaaccggtatttccaataatattaagagcgcaagaaaaatggtagagcgtgcgaaaccggaagtttgggacgcgctggaaacggtaatcaaagatcatccggtcttgttaaaccgtgctcctaccctgcatagattgggtatccaggcatttgagccgattttggttgaagggcgtgcattaaagcttcatccgcttgtttgtaccgcttataacgccgacttcgacggtgaccagatggctgttcacgtgccgctttctgcggaagcgcaggcagaagccagattcttgatgcttgcggcaaataacctcttgaaaccttccgacggacgtccggtagctgttccgacgcaggatatggtgctcggttcttattatcttaccttgcaaaaggacggagaattgggcgaaggcaaagtgttccgcgatgtcaatgaggcattaatggcttatcaggcaggcactgtttctctgcacgcggcaatcaaagttcggatgtccaaaacctttggggatcgcacggtatccaagctgattgacgctacggtcgggcggttgatctttaatgatccgattccgcaggatttgggttatgtggatcgtaccaagtccgaaaatctgcttgatcttgagattacctttaaggtcggcaagaaacagctgggacagattattgaccgctgcattaaggtacacggaacttccagaactgccgaggtgcttgaccgcatcaaagcgcagggctttaaatattctaccaagggtgcaattaccgttgcggtttgcgatgccgtcataccaccgcagaagaaagagctgctgcaagaagcggagaacggtatcagcgatatcaataaacagttccgcagaggtttgatttccaatgaggaacgtcacaacttggtcattaaaacttgggaaagcaccacgaaaaaggtttctgatgctttggctgacaacctggatgcttataacccgatctttatgatggcggattccggcgctcgtggtagtatgaaccagatcaaacagcttgccggtatgcgcggactgattgctaacaccgccggtgttacgattgagattccgattaaggcaaactaccgtgaaggtctgaatattttggaatacttcatttcttcccgtggcgctcgaaaaggtcttgccgataccgctttgagaacggctgactcgggttatctgactcgccgcttggtcgatgtttctcaggatgttattattcgccaggatgactgcggcactgatgagggcttggaaatctactctatcaaggaaggcaacgagatgatcgagccgttgtctgagcgtttgtgcggacgttatttggtagaggatctgttggatccgcaaaccggtgaagtgttgatctccaaagataaaatgatggatgattccgatgccaagaaggtacttgccgccggcatcgaaaccctgaagattcgttcggtgctgacctgtcacgcaaagcagggcgtttgtgcgaaatgttatggttccaaccttgcaaacgggaaaacggttgcggtgggcgaggcagtcggtattattgccgctcagtctatcggtgaacccggtacgcagttgactatgagaaccttccataccggtggtattgcgtctgcggaagatatcacgcagggtcttccccgtgttgaagaactgtttgagggcagacgtccgaagagctccgctattattaccgaaatttctggtaccattcgaatggatgaaatcaaacgggtgcgtcatgcaattgttaccggtgag

SEQ ID NO: 2359 - DNA, 1350 bp, unclassified Ruminococcaceae
gaagacttttataagatgatcaaaacacgcagtatccattccagtgctgtaaccttaattaaaaatattgagcaggatgatttggaaacggttatttctaatatcgccgagagcaatgatatttgtattcgagtggtggatcagaacggaactgatatcagcagtgcagaaatggcacgggattgtaccattcataagctgggtgcccgtcagttgtcgatatattacttaaacgcgttggaaaacaacggcgaatatctggaacgcagggtaaagtttacgcctaatattggtttttttgatgagtttggttggaatagcacaaatccaaataccgaccaatcgcgcaaggaaatggaaagcattatttacgtaaagctgacgcagcgagataatcaggaagtgatgataatgctcaatgcggttatttctccggtggatgcgacagtctgtactttgcgcattcagctgatgtggatatcggtcatcttaattttattggcgttgatattgtcaataatgattgcaaaaattatttcaagaccgatagaaaagattaatgattcggcgaagctgttggcaaagggaaaatatgatattacttttccgaacaacggctatcgggaaattgccgaattgggagatacactgaattatgccgcaacagagctttctaaaacggaagaactgagacgggaattgatcgcaaacgtatctcatgacctgcgtactcccttgaccatgataacggggtacggtgaggtgatgcgggatctgccaggcgaaaacacgccggaaaatgtgcagattatcattgacgaggcaaaacggcttaccgatcttgtaaatgatatgctggatatttcaaagctgcaatcgggcacgcaaacgttaaaattagaacgtttttccctgaccgagacgatacaggataccatgctgcgatatcacaagctgacagaacatgacggatatcagatttctttcttatatcgggaaaatgtttttgtgacagcggatcagctgcgcatttctcaagtggtttataatctgattaataatgcgatcgtttataccggtgaagataaaaaaatcgaagtttctcaaacggtatatgatgacaaagtacgcatttcggtaacggataccggagagggaattgagcaagatatgctgccgctgatatgggaccgttattataaagtggataaaacgcataagcgcgcggttgtgggaaccggattaggactttctattgtaaaatctaccgttgagttacacggcggtacctgcggtgtaatcagccaaaaaggtgtcggaagcactttttggtttgaattaaagctttga

SEQ ID NO: 2360 - DNA, 1953 bp, unclassified Ruminococcaceae
ttggaggaaaatcaattggataacgaattaaagaatcaacagaattatgacgaaaatcagatacaggtgctggaggggctggaagcagtacggaagcggccgggtatgtatatcggctcaaccggaccgcgcggtctgcatcacttggtgtatgaaatcgtcgacaacgcgattgatgaagcgttagcgggatattgctccgaaatcactgtggagatattgcccggcaatattattcaggtcagcgataacgggcgcggtattccgaccggtattcatccgaaagagggaatttcggcggcgaccgtagtatataccattcttcatgccggaggtaagttcggcggcggcggatataaagtgtccggcggtcttcacggcgtcggcgcatcggtagttaacgcactgagcgaatggctggaactgacggtatatgacggtaaagaaattcattttcagcgttttgaacgcggtcattacagcgaagaaatgaaagtagtcggtcagacggagcaaaccggtacgactgttaagtttaaacctgacggagaaatttttgaagataccgtttatgattatgatattctgctgaccagaatgagagaacaagcctttttgaatgccggaatccgtattatcatgaacgataagcgcaacgagagcgagccggtttcggaagtccttcattacgagggcgggatccggagctttgttgagcacattcacaagaaaaaaggcttggaagtcctgcatgatgaggtcatttatcttgccaagcaggagggcgattcaattgccgaaatcgccatgcagtacaacgacagctataatgagtgtattttgtcctttgcgaataatattcataccattgagggcggaacccacgagatcggcttcaagaatgcgttgaccagagtgtttaacgattatgcaaaacggcataattacctgaaagaagcggataaaaatttaagcggcgaagatgtccgcgagggcttgaccgcaattatcagtgtgaaattaaccgaatgtcaatttgagggacagaccaaagcaaagctcggcaatatggaagtgcggccgctggtggaaagcatcgttaccgaaaagctgaccaactacctggaggagaatccggcagttgcacgggaaatttttgataaagcaatcaatgcacagcgggcaagagaagcggcaagaaaagcaagagagctgaccagacggaaatccgccttggaaacggcaagactgcccggcaagctggcggattgttcggataaggataacgtcaacaccgaaatttatattgttgagggagattcggcaggcggttccgcaaaaagcggacgcgaccggagattccaggcaattctgcctttgtggggcaagatgctcaacgtagaaaaagcacggattgacaaggtttacgggaatgaaaagctgacgccggtggtaacggcgttgggctgcggtctgggagacgatctggaaatcgaaaaactgcggtacggtaaaatcatcatcatggcggatgccgatgttgacggaagccacatcagaaccttgctgttaaccttcttcttccggtttatgcggccggtgatcgaacaaggacatgtttatctggcacagccgccgctgtttaaggtctcccgcggaaaacagttccggtatgcgttcagcgacgaggaacgggatatttatatcaaggagctttcgggagaaaacggcgctaaggttgacgtgcagcgatacaaaggtcttggtgagatggatcccgagcagttatgggaaacaacgatggatcccgaaacccgtaccatgatcaaggttgagatggaggatgccgtaaaagcagacgaaatctttacgatattgatgggagacaaggtagagcctcgtcggcagtttatcgaacaaaacgcaaaatatgttcagaacttggacatctag

SEQ ID NO: 2361 - DNA, 1890 bp, unclassified Ruminococcaceae
atgtccgattttttaccggtttcaaaaaaggatttggagaaaaaaggtatcacacagcccgatattatttgcgtaagcggggatgcctatgttgatcatccgagttttggcattgcaattatttcacgtgtgattgaggctgagggatattctgtcgcaataatccctcagcctgattggcataattcagaggacatcaaacgctttggcaagcctcgattaggtttttttatcacctccggcaatattgattccatggtggcgcactatactgctgcaaagcggaaacgatcggatgatgcctattcaccgggaggaaaagcgggaaaacgtcctgaccgcgcggtgattatttatgcacagatggcgaaaaaggcatatcccgatgtaccggtcattatcggcggattggagacttccttacgccgctttgcacattatgattattgggatgatgcggtgcgtccctccattctcgttgacagcggcgcagatatattggtatacggtatgggagaaaaccaaacccgacaaatcctgaaacggctgaatgacggcgaggatatcagccggattaccgatgtgaagggaacttgttatctgaccgagcctgtcaataccccctggggctcggtggagtgtccgtctttggaacaggtgcgcaacagcaaagaggcttacgcgaaggcttgcagaaagcagatggacgagcaggacgatgtggtaggcagacgactgattcagcgacaggggaataagatgctggtgcagaatgagccgatgccgccgctgagtcagaaagagcttgaccgtgtttacgcattgccctatatgagagcgtggcatccgatgtatgattcactgggcggcgtccccggaattgaagaagtggaattttcaattacgcataatcgcggctgtttcggaaattgcaatttctgttccattgctttgcatcagggcaggaaaatcacctgcagaagtgagaaatcattgctggttgaggcagaaaagctgaccaaaatgccgggatttaaaggatacattcatgatgtcggaggaccgacggcaaacttcagacatccttcttgccataaacagctggaaaaaggtttgtgtaaggggaaaaaatgccttgcacccaagccttgtccggcgctggaagttgatcatatggagtatctcggtattttacggaaaatgcgtgctttgccgggaataaaaaaagtatttatccgctccggtattcggtatgattatttgctggaagacaaagacgatacttttttgaaagagttggtcaaatatcatgtcagcggacagttgaaggtggcgccggagcattgcagtgccgcggtactggataaaatgggcaagccgcatatcgagagttacaaggagttttccagacggtattttgaagcatccggacaggcggataaggagcagtatttagtgccatatctgatgtcttcgcatccgggcagtactttgcatgaggcaattgaacttgcactgtttttgaaaaaggaaaagatacgtccgcagcaggtgcaggatttttatcctactcccggtaccatatcaacctgtatgttttataccggtttggatccgtacaccatgcagtctgtatatgtgccgagatcagccgaagaaaagaaaatgcagcgcgctttgctgcaatattataaaccggaaaaccggcaaattatcacagaagcattgcggcgtgcaaagcgtaccgatctcatcggagacgcaccgggatgtttaataaagggagaacccggggcggtaaaaaacgcagtaaaatcggataaaaaggaaagacagcctgcatccgggcggaaaggaaaacaggtgtatggcaagaagaaaaagcggtag

SEQ ID NO: 2362 - DNA, 1326 bp, unclassified Ruminococcaceae
attaagatacccgaatacgcattgcgtgctgtccgtgtgctggaaagcgccgggttttctgcttattttgtgggcggttgtgtccgcgacagtctgctcgggaacccgccggctgattgggatattgccaccaatgcacttccggaacaggtcaaagctgcatttcgtgggtacactgtggtggataccggtttaaaacacggtaccgtaacggtggtgtccgactatcataacctggaaataaccacctaccgaatcgacggtgattattcggattcccgccgtcccgacagcgtgatctttaccgccgatctgcatgaagacttaaaacgccgggattttaccgtcaacgcaatggcatatcatcccgagcagggattggtagacgactggggcggcaaacgggatttaaaagagaaggttcttcgttgcgtgggcgatccggaacagcggttcaaggaggatgccctccgaattctccggggactgcggtttgcggctgttttaggcttctcgattgagccgaaaaccgaaacagccctgcggcaaaaacgcggactgctgtccaatatttctggcgagcgtatccgggaagaactggtaaaactgctcttcggggaaaacgtacagcaggttctgcttacctaccgcagtattttgggagaagtactgcccgaaatccgccctgcctttgattttgaccaaaaaaatccgcatcactatctgaccgtttgggaacacaccgttcaggcaattgccaacagtatcccgtcggtacgggtgcggcttgcattgctgtttcatgatctgggaaaaccagcctctttcagcctggatgaaaaaggaatcggacatttctacggacatcccgaattgagcgaacaggctgcccgggaaatcatgcaccggctccattttgacaacgcgactatcagccgcgtgactgcacttgttcgttatcacgactgcgacattgttccccaaagcaaatcggtcaaacgctggctcaaccggctgggtgaggagggctttcgggaattgttagccgtcaaagccgccgaccgcagcgcaaccactcataaatacgaaaacctatcggtactgcaattgattgaaaatatccttaacgaagtgctcgcacagaatcagtgctttacaagagaacagcttaaaattaacggcagtgacttaatggatctcggcatcccgcaaggtaaagaaatcggcagaattctggacgaactgcttgcccttgtgattgacgaaaaactgccgaatcaaccggctttgctgaaaaaacgcgctgacgcactgtggcggagataa

SEQ ID NO: 2363 - DNA, 1338 bp, unclassified Ruminococcaceae
atggaaaaaaagtccgtaaaggtcggaatggtgtcattgggatgtccgaaaaatcaggtagacgccgaaattttgctggcaatgattcaggacgccggatatgaattgacaaatgaagcgggacttgccgatgtggtaattgtcaacacctgcggttttatagaaagtgcaaaacaggaatcgattgaaaacatattggagttttgccagttgaagcaagagggacagatcaagtgtgtggttgttaccggctgtttggcggagcggtatcgggatgaggttgcaaaggagattccggaagcagacgtcatactggggcttggctctaacaaggaaatagtatctgcaatcaaaagggctttgtcgggggaacgttttacttgctatggcgaaaagaacaaattgccgatggagggcaggagagtgctgaccactctcccgtattatgcttatctgaaaatagcagagggttgtgacaactgttgcagctattgcgccattccgatgatccgcggcagatttcggagccggaaaatggaagatatcattgacgaggcaaaagatttggcggcacgcggcgtcaaagaattggttgtagttgcacaggatacgactcgttacggtgaagatctgtatgaaaagcagctgcttcccaaattgttggaagagctttgtaagatagacggatttgtttggatacgtacattgtactgctacccggagcgcattacagatgaattgctggatgttattgcccgtgaggataagcttgcaaaatatttggacattccgctgcagcattgcagcaaggatgtattaaaagcaatgaaccgaacaggcaatcgggaatctttgacagcgttgatgcaaaagatcaggcagcggattccggggatcacactgcgcactacgttgattgcaggcttcccgggagaaacggaagaaaatttcgaagagctaatggaatttgtgaaagaaatacgatttgaacggttggggtgctttgcttactctgcggaggaaggaactcgtgcagctgcaatgaaggatcagattccggaagaaataaagcagcagcgcgccgatcacattatggaacaacagatgtttattaatgagcaaaacaatcaggcggaaatcgggaagacaaaacgagctgtggtagaaggatatgataaatacggctctgtctattttggacgtactgagggcgatgcaccggatattgacggaaaaatctttttcagttcggcaaaaccgctgaagatgggtgaatttattgacgtattggtagaagacgtgcttgattatgatttaattggcagagtcgtagattga

SEQ ID NO: 2364 - DNA, 2967 bp, unclassified Ruminococcaceae
aattttattttgggacgatcgggcagtggaaagtccacttatgtttttgaaaaaatgaaagagacattggcaaccactgatcatagggttgttctgattgttccggaacagttttcttttgaatccgaacgaaaaatatacaaagagtttaataatgctgggattcaacgaattgaagtgcttagttttatgcgcctggcaaacagtgtttttcgaaaatacggcggcttagcgggcagatatgcagaggagtctaccaaaaccattttaatgaatctcgcgttggagcaggtgcatgattgcttgaaggtataccggaaatcctccggcgcggtattgacccagtccatgctggatatggtaaacgagttcaaaacatgggggattgcagacaagcgcttgagtgaagtcgaagcgcaactagaagaaggacacctaaaggataaactgggagagctgtctttgatttattctgcatacgaggcgctgatgggcggcttgtatcttgacccgttggatgatgtttcgcgtgcggcggcgatgttaaaggacaatcggtattttggaaatacagtggtatatttggatgaatttgacgggtttactgcgaatgagtctgaaattttaaaagcaatttttactcaggcaaaggacgtctatctttctctttgcttaagcagcgtgaaagccggtgataaaacaggtttgtttgcaccggtcaaaaaggcgtttaaccgcgtattacggcttgcgaaagagtgcggcgcagatgttgcggttccggttgtgttgcaggagaaaaagaggtttgttacgccggaaatggctcatttggagcagaatgtgctggcggagcatattgacgctttcgatgaaccctgtgagcatattcgtgtgttcagtgcggcaaatgagtacgatgaagtggattacatgctggcaaccattaaaaatctggtgcgtgagcagcagtatcgctatcgggatatcatgattatatcccgcgatttgacaccttatcaaagtgctttgcaaaatggatttgcacactataagattccgttttttatggatatgcttggatccgtaacggaaaaaccattgattcgttttgtcgatagtttgttgaaagcggcagtaaacagctgtaatgtcaatgatattttgaatcttttaaaatgcggcatattagatttttccgcggaggatatttcccgatttgaaaattatatctatacatgggatatcaaaggatccgggttaaagcaggagtttaccgctcatcccagaggatatgtagaattgtttgaggaagcagatatagaagagcttgcttttgtcaatcagcttcgagcgcaggtcgtggaaacggtattagaactgcaaacacggtgtgagcagagtaccggagccgaaataagcgccattttatatcaaatgttagaacggctgcaggttcaaaaaaacgtgcagatgacagtagaaaatctgaatcggatgggtatgccggtattagcgtcagaatatctgcaaacgtgggagatttttgtgcagatactggattctttagccgtttctttgaaagacacggagatttccctgaaacgatatgcacagttatatcagctggttgcagatacttatcaaatcggtgaaatcccgcaacagttggattgcgtttcggtgggagcttctgaccgcagccggacagcgaatccgaaggtggtttttgtgctgggggcgaatgacggtgtgttcccctatgttccgagcagcgtcggattgttaaccgatggcgaaaaacagcaattatccgcttttgatatgcagctttccaggagcttggaggaaatgattttgcaggagcgctttcttgcatataaagcgttgacttgcgcaagagaacggctgtttgtaacttatcgcagagcctctgtggacggaaagccgacagcgccgtcttttattgtgaatcagattttaatgatgtttggtcagaagtgtaaatattcggatgagcaactggacgctctttattattgccaaaccgatcaaacggtttacagccgttttgccgaatgctttaagcaggatacgccgcttcgagctgccatggaggagtacctgaagcattatggctacgcagatcaagtgaaaaaactgtatgaggttgcagaacacaaggagtattctttccatgacaaagcattggcaagcaaattgtttggaaaagagattcggctgtcagcgtcgaaattggaacgatatcagaattgccgctttttgtatttttgcagtgacggattaaaagcaagaccgcggaaaaaggcggaattgaatccgctggaaaccggagtattgatccatgatgtgatatataagctgatgtctgatccgaagctgtcgctttcccaaatgcaggatgacacgttgagaagctttattcaagcacaattggatgaatatattgcaacaaaaatgggcggcgcacagaccaaaaccaaacgctttttatatttgtatcatcgcatcagcaatacactgtttcaaattgtttcccatctgagagaagaaattcggcaaagcggctttgttccgactgattttgaactgcaaatcggacggagcgggcaggtacaagcaagagaaatgatagcgccggacggaaccaaggttatgatagagggcagaatcgacagggtagacacctatgagaaggacggtgtaaagtatgtgcgcgtcatcgactacaaaaccggcaacaaagaatttaagctgagcgatgtgatatacggattgaacatacagatgcttttgtatctgttttctctttgggatgcgccgcagggaaaatatcaaggaagcgtgcctgccggaatcctgtatatgcctgccaaggcgcctaagccctctttgggacgggaagcggagcaggctgatatcgacgcgcagttcaaaaaaagctat

SEQ ID NO: 2365 - DNA, 1341 bp, unclassified Ruminococcaceae
atgaaagattcgtatgaaagcccgttttgtacccgatatgccagcaaggaaatgcagtatatattttccgctgataaaaagtttcagacttggagaaggttatgggtggcattggcacgcgccgaaatgaaactcggattgcctgtgaccaaggaacaggtggaagaactggaacagcatatcactgatattaattatgatgtggctgaaaaaagagaaaaagaagtgcggcatgacgttatgtcacacgtgtatgcttacggtgttcaatgtccgcaggcaaagggcattattcatctgggcgcaacttcttgttatgtcggcgataacaccgatgtgattattatgaaagacgcgcttcaaatcgtaaagagaaagctgattaatgtattggctttattggcggattttgcggatcagtacaaggacatgcctgcactggcatacactcatttacagccggctcagttaacaacagttggaaaacgagctaccctctggatgaacgaatttttgatggatttagaggaaattgagtaccgaattgaccatttaaaactattgggatccaaggggacaaccggcacccaggcaagctttgttgaactttttgacggagatgcttccaaaatcaaaaaactggagaagatgattgccgaagaaatgggatttgaagaagtggttcctgtttcgggacagacttattccagaaaggtagatgcgcaggtagtcgcagctttaggcggcttggcacagagcgccagcaaattttctaccgatatgcgtattctgcaaaatttcaaagagatggaggagccttttgaggcgcatcaaatcggttcttcggcaatgccgtacaaacgcaatccgatgcgttcggagcgaatcacttctttggcaagatacgtcattattgatacactcaatccggcttttacttcggcgacccaatggtttgaaagaacgctggatgacagcgctaacaaaagaatatcggtggcggaagcatttctcgccacggacagtatcctcaatattctaatgaatgtatgcaacggattggtggtttatcccaaggtcgtggaacagcgggtattaaaggaattgccgtttatggctaccgagaatattatgatggaggctgtaaaaaaaggcggcgaccgtcaggaacttcatgagaagttgcggactcattctattgctgccgcaaaggtggtgaaagaagagggacttgaaaatgatctgattgatcgtatatgcgcagatgaaagtttccatttaacccgtgcggaaattgatgggattttggaaccgaaaaactttaccggcagggcatcagag

SEQ ID NO: 2366 - DNA, 2961 bp, unclassified Ruminococcaceae
atgaacagtttcatgaaagactcatttaacccggcgtattcctttgttccgaatgaggaaaaggtgctggagttttgggagcaaaacaaaagttttgaggcgcttcggaagaagaatgccaaaggaaaaaaatatcgttttattgacggaccgattaccgcgaacaatccgatgggtgttcaccatgcatggggacgtactttgaaggatgtttttctgcggtataaagccatgaatggctatcagagccattaccgcaacggttttgacggacagggcttgtgggttgaagtcgaagtggaaaaagaactgggctttaattcgaaaaaagatattgaagtttacggattggacaagttctccgaaaaatgtatcgaacgggtacagcgtttcagtaaggtgattatggaacaatccaagcgtttgggacagtggatggattgggataattcttactacacttataaagataataacatcaccggaatctggcaggtgctgaaaaaatgccatgatcatggttgggtaaagcagatttacaagccaatgccgtggtgtcctcgctgcgggacctctttgtctgagcatgaaatgtcaggctcctataaagaaatcgagcatactgcggtgttctttaaggtgccgcttgcggacaaaagcgcatatatgctggtttggacaacgacaccctggacattaaccgcaaacgtcgcattggcggttcatcccgaattaagctatgtaaaagcaaagctggagggagaagatgtcccgctgatcatggggaaaaattattttacccaaaagtttgcttccaagggtgaaattttgcaggaatacaaaggggaagaactcgcaggattagagtatgagacctgttttccggagcttccgctgcaaaacggtgtggatcatcatattgtttgttgggaagaagtcagcggcgaagagggctgcggaatcgtacacatagcgccgggatgcggtgcagaggactttgaactcggcaaacgggaaaacttagacgttttggtgccggtggatgaaaacggtattttgttgccctcttgcggctttttaagcggattggaagcgggcgatgcgcgtgaagcggtgtttgaagcactgaaagaacgcggaaaaatgttttatacccataaaatcgttcatagctatccggtttgttggcgttgtaaaaaagaggttattttccgctgcgtaaaagaatgggcaattgatgtggaagagttgcgccctcagttgatagccaatgcaaataaggtgaaatggaatcctccgtatcaaggcaagcgaatgcttgactggctgaataatatgtccgactggaatatttccagaaagcgtttttacggattgccgctgccgttctatccatgtgaagaatgcggcgaattgaccgttatcggttcggtggaggaattaaggaagcttgcggttcatccggagaaggttgacgcgctgccccatctgcatcgtccctggattgatgagatagagattgtctgtcctcactgcggcaagccggtaaaacgggtgccggaggtaggagacgtttggctggatgccggaatcgtcccctttaccactttgaagtactttgaggacagagaatattggaaagaatatttcccggcagaatatgttgtggagatgaaggaacaggttcgtttgtggttctattcgatgctgttcatgagcacggtattggtcggagagccgccgtatgagcaggtaggcactcacggcatggtaactgccgaggacggcagccgcttctctaagaccggatttatgattaaattcgacgaggcggcagataagatcggcgccgatgcctcccggtatatttttgcctcctccccgatgtccactgatgtgcggtttggatttacgctgggcgacggcgcaaaacggaagctgctgtctttctggaatttgtccaccttctttgcaacttacgcagaggtagacaagctgtatttggataatcttgattttgactttgattctctttgtttggtagaccgttggctggtcgttctggtaaacaactttatttcagaagcaactgcggcgatggaaaactattctaccaaagatatcatgacaaaattcgagaaagtggttgacgatatctctaacttctatatccgtgttaaccgtagacggttctggaaaatcggtgatgatcaggacaagaagacagcgtataaagtgatgctgtatgcaattcgcaccattgaccagattatggcgccgattattccgtttattaccgaacacgtttggcaggaagtgattcgccggtactccaatgaggcggcggaatcggtgcatctgagtgattggccgaaggtaatggcacaggtggatgtgcaggacggtgttttggcacaggtaggtgaggtccgtgacatcatttcgctggtgctcaaggttcgtaacgagaaacagctgagaatccgtcagccgctcaatcagctttatatctgtgctgattccggcgtggttaccattccggaagagttgacggccattctgcttagtgaaatcaatatgaaacaggttactttcctgacagatacttcgatgttggaaaataatgttgcagtactgaactttaaattggcaggaagcgcgctgaaagcagatgtcaacaaagtgaaggaattgctgaacggtttgtccgcagcagagatgcagtcggttgtagaacagatcaaggcaaacggttctgttaatataccgggttatgatcacgctgtcgatgcagcgatatttgagctgaaggctgttccgaaagccgatattgcggtcagcaaagaacgggatatcacggtcggattagacatggttgttacaccggaactatacagtgaaggctgtttgcgggatattctccgtcagtgtcaggtgttccggaaagaggcaggctttaat

SEQ ID NO: 2367 - DNA, 2187 bp, unclassified Ruminococcaceae
atgaatcgaaaaggttttgttcgcccgattgcagtaatcggttttacatttttgtttacactgttaacggcgtctgctcttcctttgccgtttaacatcggtgctgcagcattgtgcatgattgcagtgcttttgatatcactgattataccgctccgcatgccgaagctcgcgttggtcctgataacaattgctattgctttgggcacgttttctatccatacttatttcaattatcttcctgctgtcaagctggatcaacagcagaagacggtcaccggcaccgttaccgacctttctgtttccgaaaagggaaaacaagtccttacagttcgtctcgaccatgaaatcgttccgacctttcgtcctgtaaaaatacggatcttcctggaaaacagtatctcgatcaggattgccgacagaatatcttcaaatacatattgttatcttccatctgaacaatacgggctgtattctcctcaggattctgcaaaaacggacggtatttatctttacggctatgtccaagaggggaacctcactgttttcccggacgacggctttcatctatcccgcttgctgtaccaatttcgtgacaatctgaagcaaaaagccgagtcattatttgcctctgagaaagcagacttcataaaggcagtgctcttgggagataaaaccgatctttccgatgcatactatcgcaattttactcataccggagtcgtacatctgctgacagtatccggactccattttgtcattctaagccagtttgtcatccgcacgctgaaagcatttcgtttgaagcgaaagccgagatatgccatcggaatggcaatgattgttttgtttatgggaattgctggattccaacctgccgtctgccgcgcgggttttaccctgttgctgttctacggtgccaagctgtttaaccgagaatcagacgctttgacttctctgggactcgccggattagtctttgcgcttgtgaatccctatctggtgctgagtctcagctttcagcttacctatttgtctactttgggcattctgctgttcgcggccaaaatacaaaccttcttggtacaaaaatggaaacggaagcatccgttttggatatgggcatcggatttgctgtcggtgacgctttctgccacaattgccactctgcccgtcaccgcatacacttttcagggaatggctgttctggcgcctttgtggaatattttactttctccgttatttaccgttgtactggttgccggactgcttacctttgttttggcatttttaccctacctttcgatgatagcggaggtactcgcggcatttctcactctctgtatcaaggcaattgacggaatcaccacattgggagcgaaaattccttacagttatctcccgcttggatatcgttttgtatatttttggatactggcgaccataattttattgttctttacctttcgatattgcagctttcggtttaaatattctcttaccgctctgctctctgctgttctcctcgcaggcggaatcattacccatgctgtggtttaccgcgacgttttgaatattgcggtttgcaccgtcggcacagatactgccgttttaatgaactgccgggaacaaagcgttttgtttcgctgcaacaacttgatttcgcgattatccgattccaacggaataaaatcgtttcctgtcgcagcagaaatcggcagtatctctgctttgcaggaactcagtcaatacgccgacatcggaactgtcattaccgaggataccattccacctgacaggatatcctgtcaggaaatcatcaagccggataattacgatatccagtccggtgaagaactgcaaataaaagtgcgaacgcaaaacgaaaaggtttactatatcatagaatacggcgaaacaaacattatcttcggcgaatatgacgaccggtttgcatcctaccatcaaaccggcaaagaaaatatttacattttggttaaggattgcaatatggtatttgaaaaaccggtcgattatgttataatgttaggcggtatcaataatgaggtgattgtaaatcatccggatactcaaattgtagacggaactgtgcagggcattactccggtattggtgtgcaagaatggttccgtaaaaatcaaaggagctggcaaatggctgtattaa

SEQ ID NO: 2368 - DNA, 1068 bp, unclassified Ruminococcaceae
atgagaaaaataatatcgatgagcttggttttggcaatgctgcttgcgttgtctgtttcctttacaagctgtaaaaagtatgcaggagaggttaatgtatacaactggggcgagtatatgcccgacggagaagatggctccatggatgttttaaaagagtttgaaaaacggtataacattaaagtaaactataaagagtttgacagcaacgaaacgctttatgcagaattaaagcccggtaataccagttatgatgttgtggtcccttctgattatatgatttccagaatgatcgaagaggatatgcttgagaaaattaattttgagaatattccgaattacagcaaaataatggaagcttacaaaaaatccgaatatgatcctactggagaatattccgtgccttattcttggggaacggtcggcattatttacaataaaaccatggtaaaagaaacggttgacagttgggatattttatgggatcagaaatataaaggaaatattttaatgtttgataattcccgtgacgcttttggcattgcgctgaaaaagctgggatattcccaaaacacaaccgatgcaaaaaaaatggaggaagctgcggcagcattaaaagagcagaaaccgttggtacaggcatatgttatggatcagatttttgataaaatggggaacggggaagctgccttggctccgtattatgccggagacgccattaccatgatggatgaaaattcggatctcggatatgcagtgccgaaagaaggtaccaatcgtttcgtagatgcgatggtgattccaaagggtgcgccgaacaaagataatgccgaaaaatttattaattttatctgtgaaaccgatgttgctaaggaaattgtagaatatatcggttattccacaccgcatcaggaagcctatgaacaattagacgatgaaataaaaagcaatcccattgcttatccttctgaggatgttttgaaaaataccgaattttttgtcaatctgccgtccgatgtaaataaaaaaatgcaggatttatgggtagagattaaaacttctaaataa

SEQ ID NO: 2369 - DNA, 2109 bp, unclassified Ruminococcaceae
atgtcagctgataaaaacagaaaaaaatatacggaaaaattgatatccgtgctccttgcgacactgctgtgctgtagcggaatcagcgcgctggcgatgaatgccgtaaatcaggcatctgatcaggacaataccggatctgctgttgattccacaacaaacgaaacttcagataaggcggaagcgggtaaaaatgaaacagtatacgttcttgcaaaagcggatgggtcggttgaaaaaattatcgtaagcgattggattaaaaattcaatggatgctgccagtttaaaagaccgaagcgacttgaagaatatcaagaatgtaaaaggagaggaaacttatacgcttgataccgacggaatgcaggtttgggatgcgcaaggcaaggatatttactatcagggcactatcgataagtctcttccggtggatctttcactgaaatacacccttgacggacaaccgatatcgccggaagaacttgccggtaaaagtggaaaagtaacccttcgattcgactacacgaacaatcaatatgaatatgttgaaatcgatggagaaaagacaaaaataaatgttccgtttattatgcttaccggtatgattttagataatgatcattttaggaacattgaggttactaacggtaagataattaatgacggcgatcgcaccgcagttatcggatttgcgcttccgggcattcaggataatcttggtattgataaagaaaaaatggaaattccgtcttatgttgagatcagcgcggaagcaactgattttgagttgtctgccacgatgacactggcaaccaacagtgtgtttaacggagttgaccttagtaaagctgacagcttgcattcactgaaagataaaatgtctacactgaccgacagtatggcgcagttgatagacggttcttctcagctttacagtggtctttccactttgctgaacaagtcagagaaactgatacaggggattcatacgcttgcgggttattccggtcagatttcggacggtgccgtatctatgaaccgttatttgaaagaagcagtttcaaacaataccgatttgaacaacggtgcagaaacagtattcaatacgctgcttgccacagtcagcagtgaaattgcttcaaacggtattcagatagatgcgctgaccatttctaattacaagaatgtcatcaacggactgttggaatctccgagtgcagttcagaaatcgcagcttattgccattgcggataaaactttaaacacaaagcttgccgaaaacggaataccggaacaatattataacgccgtaaaatggatgctgtatgagcagatgagcacgggcaaaacacaggatgaggccatgcagaacatctcgtctgtccttaccgatgcggtatttgcttccggtgttaatgctgcacaacccgattctgctgtacaggctgcagtattgaatgagacaggtgatatcacaacagcggttacggttgccaagatttgtacttatttggcttcggtaaaaggcggaaatgcgacagattatgtttccgcagcgcaagcaatggttccttccctgcaggagaaaacagaaaatgcaaaaaaattgcagactgctgtacaaacggcagaaacggcgcaaggcaaggccgctgtttcgggattgtgtctgactcttgcacaagagacgttaaagccttcccttgaaagtgcggtcaaacagctagacagctatcatgatttttatcagggtttgaaaagttatacatcggcaattcaacagatttgcgacggcagcggtgaacttgctcaaaaaacggaagagtttgcaaagggtatggagcagttgaaaagtcaaagcgctgcgctgcctgaaggcgtgaaagagttaaaagacggttcactgcgtatttctgacgggctaaaacagctcaatgaacagggagtacaaaaacttgccgatgtcatgaatggagatatcggctcaatgattgcacgtttgcgtgcaacggttgatgtatcaaagcattatcagtctttcagcggaatcgcggagggtgaaagcggcgatgtgaaatttatatacaaaaccgcttccattgaaaaataa

SEQ ID NO: 2370 - DNA, 1497 bp, unclassified Ruminococcaceae
aaacaacctgaaaccgcaaatttacaagatgacttggtatatgagttaatacgattggctcaagcagccgaagaaagaaaaaagtataccaaaactgccactcggttaatcattgatggtttgttcacaacgttgacgaatgttaactttgataatcattctattaaagagtttattaatcgtgttattaatgaacgaaattccataggaggcagtgagatcgatttggtagagctgtggaaaggagaaacggacattgtttctctgcgatctacgcttttgtttggaatgaagggaatggcggcgtatgcacaccatgccatgaatttaggatatgatgacagtaccgtaacacattggttttataaagggctttgcgccgttaatcaagagcacacagtggaagaatggcttgcgttaattatggaattcggtcaggtcaatctgaggtgtatggaacttttagatcaggcaaataccggctcttttggcacaccggttcctacccgtgtaaatgtagatataaaaaaaggtccttttattgttatttcgggacatgatttaaaggacttatcccagctgttagagcagacaaacgataaaaatattaatatttacacccatagtgaaatgctgccggcgcacggctatccgggattaaagaaatattctcatttagccggcaacttcggtacagcttggcaaagccagcaaaaggaatttgaggatatccctgctcctgttttgtttactactaactgtttgatgccgcagcgtcctagttatcaagatcgcatttatacgacttctgtggtagggtacgagggtttgcggcacatcaccgcagatgaaaacggatataaggattttactcctctcatagaacagtctctggagctaggcgggtatgaacatgaccgaagcatgagcggtattaacggaggacatatgcttacaaccggctttgcacacggtacggttttggcaaatgcaggcaaaattattgatgccattaaagacggggcggtgaagcatatttttctggtaggaggctgtgacggcgcacatccgggcagaaattattatacagattttgtgaaacaaacaccaatggatactttggtattgactttagcttgcggaaaatatcggtttaatgatcttgatttaggtgaaattaacggtttgccgcgtattttagatatgggacagtgcaatgacgcatatagtgcaataaaagtggcgctggcattggcagacgcttttgattgcacggtgaatgaccttccgctgacattagttctttcctggtatgaacaaaaagccgtttgtattttgctgacattactttcactcggaatcaagaacatgtacctcggtccgacactgccggcatttatgtcggagacagttgtaaagactttggtaaatacctatggattgcagccgattactgctccggagcaggatatggatgccattcttgggcgaggataa

SEQ ID NO: 2371 - DNA, 1392 bp, unclassified Ruminococcaceae
ttgacaaaaccgccggcggcaacatataataaagatattgtttgtttctttttgggtgatttcagactaaagaaacaaattgaaaagggactgatgatttttatggaaaaagtgatggaaaaattacggacagccagctttttgattgccaatatttctgtttatcaggatattaaagccgatcctgtgatacagtgctatattgatttacttgagaatctgactgatgacgagtgcggcttgccgttaaattatttggtggcagagtatgctgccatttgcgcacagctatatgagtccaagcatatcggacgtttttttgattacatatacaacaaagttttattaagcgaaaacttattctcggtggagtctgcaaagggaaatttcggcacgctgcctgaatatatcaaatgcgcggttacccgtgatttgaacgcgttgtatgcgttaacctgtatcacctcggaagacatcaaagcggcgcttaattaccgctatcctgaagacagcgatttaatagaattgcttccggagtatgagtcggaacccttttgttaccgcaatatcggctgttggggagacaatgcggcaaaaatagcggagtaccatcaccacaacgggatcggcgtcttctcggagcagattgcttttcgtttcgacggggaggcgatcgttccggttaaaaatattgacgcgattcgcttgtctgatttgaagcattatgaggcgcagcgcaataaaattgtagaaaacacgctcagctttttacattccaagccttgcaacaatattttgctgtacggcgaccgcggtaccggaaaatcttcgacggtaaaggcgttgctcaatgagtattacggaatgggacttcggattgttcaggtggaaaagaaaaatctcaacaatttatccaagttgattgagatgctggcagacaatcccctcaaatttattatttttattgatgatttgacttttaatgaaaacgacgacggtttcggcgcgctgaaagcggttctggaaggctcgttatccaaaaaagcagacaacacggtaatctatgccacctctaatcgccggcatttaatcaaagagaccttttcttcccgtgagggagatgaaatccatcgggcagataccattgatgacagcttgtccttgtctgaccgattcggtttgacaatcacctttatggtgccggataaggcaaaatacttggatattgtgaaaaagattgctgatgatcggaagcttgacattgacgaggaagtgttgctcaaaggggcggaacgatttgctttgcaaaaggcagggcgttctccgcgaattgccagacagtatattgacgcggtacaaggacgtttagagctgggactgccactgttgtaa

SEQ ID NO: 2372 - DNA, 1614 bp, unclassified Ruminococcaceae
atggtgatttacaacgatacgcaatctttttactgtttcggctgtggcgccggaggcgatgtaataacttttatcatgaaaatagaaaatcttgaatatattgaagcagtaaagtttttagccgatcgagttggtttacaaatgccggaaagcggtgtagacgatacgcaggcaaagctaaagatgcgaatattggagatgaacagagaagcggctcgattttttcacaaatgtttgtcgactcctgacggacaagcagggcttgcctatctgaaaaagagagaattgtccaatgaaacgattaaacatttcggactgggatttgcgcctgacagttgggacagcttgcggaagcatctgcgaagcaaaggattcaccgatgaggaaatgtatcgggggtttttggtttcaaagagcaggacgggaagttattttgatatttaccgcaacagagtgatgtttcctatcttggatttgcgcggcaatgtgatcgcttttggcggacgggtattgggtgatacaaaaccgaagtatattaactccagtgatactccggtgtttaaaaagacgaaaaacctgttttgtttaaactttgccaaaagtgaattaaacggcagactgattttggctgagggttatatggatgtcattgcaatgtatcaggcaggtttccataatgtagtggcaacgctgggaactgcactgacgcaggaacagtcacggattatcagcggatatgtggatgaggtgatattatcctatgattcagatgaagcagggcaaaaggcaaccaagcgtgcggtaggcttgctgtcggcagaaggtgtaaaaacgaaggtactgaccatagaaggagcaaaagatccggacgaatatatcaaaaaattcggcgctacccgatttaagctgttattggacggatccagcagcgctacggattacgagctggagaaactgaaggaagttcacgatattgaaactgcagagggaaaggtcggatatttgaaggcggcggttcatgacgtgctcagtaccatcccttcttccatcgaacgggaggtatatgcaggtaagctttcgcaggaaaccggtgtgtccagggaagtcattgttgcgcaagtcaatgctgttattaaaaaacaaatccgcgcgaaagaacggcaggaatggcgagatattcaaagcggaaagcaattttatcaagacaaacttaatccgcaaaaggcggcaaacaaaaaggaagcaatagcagaagaacgaatcattgcttttttgtataaaaatacagaatactgtgattatttgctgcaaaaagtaccaccggatagctttgtgactgactttaacaagcggttgtatggtataattacccaaaaaatacagcataatataacattagacagtttaagcggtgaactgacaccccaggaaatgggaaagcttttcggatatctggcgcatggagcagaactaaaaaatacaaaacaagagttggatgattatatagacgtgcttgttacgcataataatagattaacaggcgaaaagattgccggaatgactctgaacgatatcagcgaattggcaaaaaagttggaagctaagaaaaaataa

SEQ ID NO: 2373 - DNA, 1422 bp, unclassified Ruminococcaceae
tccagcggcaatccgattgaagtagaaaaactttactcagaagaaaaccgggaatgggttgatttggaagatatccccattcatgttcaaagagcttttatcgccaccgaagataagcggttctatgatcaccagggcgtcgattggaaacgtacctttgcctctttcgcaaacctgtttttgcatttttatgatacgaaacagggcggttccaccattacgcagcaggttatcaagaatgtaaccaatgatgatgatcaaagtattccgcgtaaagtcagagaaatattccgtgcaatgaacatggaacgggaatttttaaaagatgatattttggaatgctatatgaatattattgcgctcggcggagatcaatatggggtgcaggcagcatcaaaatattattttaacaaggacgtaaaggatttgaccttagcggaaggcgcctctctggcagctaccattaaaagcccaaattcgctgaatcccaaaaaaagtccggaaaaaaacaaagcccgcagaaatgattatacgctcaaagaaatgaaaaagcttggactgattacggaagaacaatatgaggcggcaatcaaggaagaaatcgttgtagccggaacgcagaccgataaaaccgaaactcccataaaaaaagtccaaagctattttaccgatcatattattaacgaagtcattgaagacctgatggaaacttatgactgggacaaaacttatgcacagcataagctatataccgccggctatcgaatttatacaacgatggatattgaattgcagaaaacacttgaggataaatataaagatccccttacgttttataaaacaagcaaggtcaaagatcctccgcaatctgctatgattgttcttgattacagcggaaacatcaaagcggtagttggcagacggggagaaaaatcgcaggcgcgggtatttaattttgccaccatggcgaatttaggaattggttcttcgatcaaaccgctgtcagtatacgctccgatgattgacgctaatttaattcactattctaccctggtgcaggattctccttctatcaaaaatcaagacggtactatgggaccaaagaactatgaaggcaaaggtaccaatcaatggattaccgttgaaaatgcgattcgtgtatctaaaaacaccgttcctgccaaattattattagaaaacgattaccgccaaaaaagctttgactttatgcaaaacaaattacggatctcctccttggtaaaatcaaaaaaggtaacgttggaaagcggaaaaaccgaaacgctcagcgatgtagactatgcgcgtttagcaatgggatcgttggtttacggtgtaaaattatccgaacttgctgccgcatatgaaatgttcggcaacggcggatactataacgaaccggta

SEQ ID NO: 2374 - DNA, 1479 bp, unclassified Ruminococcaceae
attgcagagcagtcaggcgcctttatctcagaaggaagcaatgtcccctctctggataccgaaagacaatttgaggtaacgatcaccgccaaacccggcgattatctaaaaggcggcgatatctatgccacctgccccgaaacagcgcttattctccataaatgtatgctttccccttatttggagggtgaagtaatcagcgtaaaaccgaatggattatatactgttaatgacaccgtcgtaacgatcaaaaagccaaacggagaaacagaggatttaacgctttgtcagaaatggccgatccgccgcgcccgtcctgtaaaggaacggaaaccgattaccagaccgctcattacggggcagcgtgttattgatacccttttcccgattgcaaaaggcggtaccgccgcaatcccgggcgggtttggaaccggaaaaacaatgaagcagcatcagcttgcaaaatggtgcgacgccgacattatcgtctatattggatgcggtgaacgcggcaatgaaatgacacaggtgttggatgaattttcccacttgatcgacccgaaatctcaaaaagcattgaccgatcgcaccgcattgattgccaacacctctaatatgccggtggcagcccgtgaagcttctatttataccggaatcactttagcggaatattatcgtgatatgggctatcatgttgcaataatggcagactctacctctcgttgggcagaggcgcttcgtgaaatcagcggacggttggaagaaatgccggctgaagaaggcttccctgcttatttgccgtcccgtctttcggaattctatgaacgtgccggatacatggtcaatttaaacgacacagaaggttcggtcaccatcatcggcgcagtatctccgcaaggctctgacttttcggagccggttactcaaaacacaaaacgtttcgtccgttgtttctgggcattggacaaatccctggcttatgccagacactatcccgctatcaactggatgaccagttacagcgaatatttggatgacttgagcaattattacaacacccaggtcggaagggactttctgaaatgtcgccagcaaatatccaacctcctttctcaggaagcgcagttgatggaaatcgtcaaattaatcggttcggacgttctgccggatcaccaaaagctgattattgagattgctaatgtaatccgtgtagggttcttacagcaaaatgcctttcatcaggacgatacctttgtatccatggaaaaacagcttaaaatgatgcaggtaatcctttatctgtatgaacaagcacaacgctatattgccaagcagatacctatttctcttattaatgaaaccggtctgtttgataaattaatcaagataaaatacgatgtaccgaatgataaattggatttatttgacagctattataaagcgattgatgatgctttgtcaaatcttgcagaagcttaa

SEQ ID NO: 2375 - DNA, 1491 bp, unclassified Ruminococcaceae
atgaataaaaaacaactgatcgcttgtttgatgacagtatttatgttaaatgcagtgtgttcaggatgctctgataataaaacaccgagtcaaaatcattcatcagcgacagatagcttggaggaaagcagcaatatggaaagcacagccgaattatcatcatcgcccgctgacatgataacatcatccgaatcaaccttgtctgccggggagccatcaaaacggacttcctctgcggcatctaaagtgtcctccaaagcaaacgctctgtccagtcagggaacttcttcctcatcgcagaagacaggatatatatcaaaagccaacacaaaggttgaaccaacccggacgctaacacagattaaatcgatgctgtcgtctgatgctatgaaatgtgattcctatgatttgaaaaaatatactactccctattggaacggaaatatagtgtataacgagtccttaaactttataaaagatcccaaaacaggagaatcttccgcacctttgttgtataatgcggcagaaatcttatctgttaaaaattctaagctgaatattacctacgaagaaggtgtagattacacttatgcaaacggcaagattacactgacaaagaattcgagaatacatacgtttcaatatggagatatttattttaacagcggtcatgataataatcgttgggcattgaaatccgggttaggatacaaatacacgctgttttatgagggaacctatttccatgaaaatcagatagcggttacttatttgcattctgaaccgtggacaggatttaaacccgattatgagggagataatctgcccaatgtaatcaataagctgaaaaaaggcgaaaatgtgaagattgtttactatggcgacagcattaccaaaggcggcaatgcgtccggtatgtttggggtagcgccgaatatgccaatatgggcagaaatggttacacagcggctgaaacaggcgtatccaaaggcaaatattacgatgtataatccggcagaaaatgcgacagattctacacaggggctgaaggactgcaaggtgaaagtggcaaatcaaaaaccggatttggtcattatgggatatggaatgaatgacggtacaaattctaaactgacacctgcggcttatcagagtaacataaagatgatcagagaaatggtgcgtgctttgtacagtaagcagaccgactttattttgattgcaacgactttgccgaatcctgaaatcaaattgggagatgcaagttatcaggcagaatatgaatcggtactgtatgaattggagcaaaaaggaacgctcggcggggaaggcggaacgattgtcgccaatatgacaaaaacgcatcaggaattattgaaaaagaaacgcttttttgacatgaccgcaaataacgtcaatcatccgaatgattttttagtacgagcgcaggcacagaatgtcctgtctttgctgattgagaactatcaatag

SEQ ID NO: 2376 - DNA, 1767 bp, unclassified Ruminococcaceae
acaatgaaaatagaaaataacacgggcaaaaccggattgttaaaactttatattgatgaaaacggaagcaagatatttgttcgaggcagtaaggattacggctgttttacattaaaaaatctggcagagtttatttttcagattgactgtaatggagcatcttttacagtcagtgagcaaaattgtgcaggacaatctgctcagcgggaaaataaaatttttaaaacttaccatcattctttttttgaagtagaagttgtatatgcagcagaagatgatgttttccgaaaaagaatgcgttttaccgcaaaaaaagcccttcgtatccgttacgccaaaacagaattgtgtaaatgtgatgcgcctttgcgcagaggcggagagggacagccgatactgattaatgaaatggcttttatgggaattgagtttccggcttctgtcaatcggattaccaacgatacgattttattggagcagtctccttttattgacttagctgaaggcgaaacatatgagttttatccgattgtgtacgggatcggaagcagtaaatccattgaggcagactttatagactacatacgaaaaaacagagtaacaacgaaaaaaggactgaaaatatacggtgactgggcagctcatgatgaattgtccgacagcgacccgttggatgaagcaatggcgctgcgattgctccattccttaaatgatgcaaaagaaaaatacaatgtttcattcgatacctatttaatggatgctttttggtatgaagaaaaacagccctatacggcgtttaaaaagaatacttggccgaatggtattcaacctttccttgtaagccttgagaaaagcggtatggatttgggattgtggtttgacgtaaatatggaaaaattggagctaaacggatataccaagcgacaggagggcgattataagctttgtctggcggatcctaaggtttctgacgctttgtttgacggtatcgagcagcagatgcgcgaatgcagattgaccagtattaaactggattttgcatattttgaatgtgaaaataaagaacatacttaccactcggctttgaaaacagaatccaaagagcctgcggttcgaaactttttacatggtattgaacggctgaaaaaaatcaatccgaatttattgattttggcttataacggattcacgaccgatttgaaatatctggcttatgtagatgaaaagctgtgtaaatatacggtatctccgtggtggctgttctatttaaattatatttattgcggcgatcccagaccgtctgaggttcccacgcggaatttatccaattcaattatttattataccgatgccatgattgcacagtttgcaaaatctttgattccttttgaaggaattgatgatcatggtacgatgatcggaaaaacgggaaccatttataatctgaaaacagagggcttttatgacagttggatcatgaatatttccagaggcggacagaaactgcatcggtacggggaaactgattatcttaccgagcagcattggaaatttatcagggacagccgggaaatgtttgactttacctgtcggcccgacaatataaccactcagattttaggtgttccgaatatggagcgtccatatggatacagcaattccaatggatatgagggatatattactttggtcaattgctgtaacatggaaaagattgtttcagtgagcttggaggaatggaaattcgcagacaatctggagtgggag

SEQ ID NO: 2377 - DNA, 1590 bp, unclassified Ruminococcaceae
gtaaaaacctataccattgttcgtaaagtgaaagtattcgagagcgtcagcccgacaggtacgctggaagtggacggagaaaccagtattcgggtagaggcaaaagtatatcgcggttctaaggtgacggctgtctttaacgggaaaacgattacgttaagcgagcttgagagcgccgacggagagaacaaggattctacttatacttcttatgtgggtaactttactgcgccgaaatcgggaacttccgacaaaaagctgggtgcaattcagtttaaagcgacttataaaaattctaccgagagcaaaacaggcgcttctgttacgctcctcaaaaaaatagagataccggattggtcgccgggaggcggagatggaatcggtggttctgttttgccgccgattaatccgaaattgcaggtgagagtggatactgattatttggaagtatatgatcccggcgatactgatccgtatccatctgccaagtattattcactgcccaagggaacgattgattatgttgattctcagcgcgtaatcagcggcaagtcgttttattatctccattccggcaagcgcgttctgaaatctgatgtcacaacatttacgggtacctataacggaaacaacgctttgtctgagatggagttcagtgaagaaggcaacgcaactatactgcgtttgaagcaaaaatggaatgccccgtttaatattactttcaatgatgtggaatattataccggctctgccgatcatgatttttatgtgcgtaattttacttccgatacggtgacgattacctttgattatgccacccaggctgaggcggtttctaaagagttgttgaaaaatacaaccatgtttaccgatatcaaattagagaagatcatacagtataacattgatcgttaccgtctgcatttaaaactggcacgacccggaaagtattacggatgttattcctattacgatgaagatgggtatcttgttctgcgttttaacaatataaaaggcagtttaagcggtgtacgcatttttattgatccggggcatggcggatcggatcccggcgcaatcggtaaatatgtggaaaacaatgaaacatatatcgtaaaggagtcggaagttaatcttaaaattgtccaaaagcttgcagaaaaattgcgtgcgcagggagcagtggtcgaatatcttaccgaggaagagcgggcaaagtatatggcgagtgccgggggactgcctgatcgttataaatcgggacagcgcttcaaggccgaaatcatgttgtcggtgcactgtaacgcaagcggttcgagtgccagtggaacagaggcgtggtatactacgccgttctctatgcctcttgcccgggaaatatccgcgggaatcgcggcttccgcaggaattaataatcgaggtccgcataataatcgttttgcggtgaatcgcggcagaacttttccgtccgtattagtagaaactgcgtttatttcaaacgacaaagaggttcgtatattaaacagcgcggaaggacaggataaaattgctgcgggtattgtaaacggcattatgaattacttgaaataa

SEQ ID NO: 2378 - DNA, 1854 bp, unclassified Ruminococcaceae
atgacaatttatgtttgcatcatattactcatcgtcatattttttatcaccatgatacgcacacggcaattagctttaattcataagatctattttgtagcagcagcattgttggttacatggctgttggggatgattggaattcgatatacggctcctgatcaggtagataggttaatgattttagatgctattacaacattaagcgcttcctttataccgcccttttcactgctgtttgcaatctgttatacaaaagaatatgatacttatttgccaaaacgctattggtggctgctggcagttcctacgctgacaacgctgatgattttcacaaataagtatcatcacctctattacaaggtgttttcactttccagtacagaggtacggtttgggccgtattttcttatccattcggcttatacatatatttgcgtagtattttctatttttattatcattcgttttgcgataaaaacaaagatgcgtctgcatattttacaggctgcactgtttaccgttggcagcatattcccgagttttatcaacttgttggtcgttactaatgtgattcaatctacgattgcgcttactccgattagcttttcggttactttgttttttcatggtattattatttatggtctgcatttttttgatatcaaaccgattgctatgcagcaacttattaattggatcggtgacggatatattgtaactaatcaatccggtttggtggtcagctataaccgcgctttttcggaggtgttcggtgaacagtatcatgttagggaaaacgttcatttgcaggaatgttttcaggatgaggatgctgaaaataaagcagctttatataatcttttgaccgctatccgttcttgccaggagtcgcatactaaggttacctacgagcaagcgatgatggtgccgaaaaatcaggagtatatgaaatgcttttatatgattgaggtaaccccactgattattaaaggcaatatatgcggctttttgtcgatattgagagatatcacacaagtgaagaagaacatgcagcgtttgcaggatagtcaagtaaagatgatggaacaggaacggttggcttttctgggacaaatggtcggcgggttggcacataacctgaagacgccgattatgagtatatccggtagtgtttctgcggtggaaaatttagtgcaggaatgcacaataagcatgaacgatccggaagtaactgatgaagactatcgtgagatttacagcgaaatggacaattggatgtcgaggatacgggaagcatgctcttatatgtcggatattatcagtgcggtaaaaggacaagcagggaatatgaatgtttcaacgaaagaagatttttcgttggcagaaactttcaagcgagtttctcttcttttgcggcatgagttattgaatcatcagtgcacgctgaaaatagcgggacagctccatggcgagaatgttttgattcatggggatatcaataatttagttcaggtcattaataatttggtttccaatgcgattgatgcacaattacccgacggcaatcatgacattattgtacgtctggataaggacgatcaattcctgaaaattacaatcaccgatttcggttccggcatttcggatacggttcggcgaaagttgttccaggagatggttaccagtaaaggaacaatggggacggggcttggcatctttatttccaacacggtgattcgtgcaaagtttgacggaaccatgtggtttgaagataatccggaaggcggaactgtctggggaatctccattccttttgacaatgttacttttatttcggaggaaaggagttga

SEQ ID NO: 2379 - DNA, 1629 bp, unclassified Ruminococcaceae
atgaaattcagaaaagggatcgcgttattgttgtccgtttttatgattacatcaatgattggaatccatgtatctgcgtcggaaggcgctgatgtagcaaaaatcggcacgaatctttatccatcactgaccgaggcaattaacaatgcacaggacggagacactattactctgctcaaggattgtagttttggctggaactctgcatatcaattcgagaaaagcttaacttttaccggtaattatacaatgacaaccaacacctatggtttttatataaagccgggaaaaacgatcaaactggacggatccaagctgaatatggtaaatatttcatactcgcataatggggacggccaagtgaactggacatctatcattatgggatctgaatccaaacttatactcgataacgaggcaaaattgtctattgagggcggcaatgcggaagcagcaatacaaggcatttccacttgcggaaacgccgaaatcaccttagacaacaaatcaaaaattaatatcaaagactgcggagaagatgcttttgagcgtgtaagcaatgacctcaataccaaagacaaaatcaatgtgctcaaccactctgaaatcgaagtagatcattgcagaggcgctttcatcaacacttttgacattacaattacagaatccattgttaatgtgcatgattgtaccggcaatgcttccaacggcagtaacttttatattaccgactctacggtatctttcataaacagcggtgcgcacggtatttctgcttctgaatttatcgtcgataattctaccgttacttccaataaaaatggagcaaacggaatcactgtcagcggtaaaatggaaatcaaaaacaaatccaaggtagaagtttccgaaaacaaatgcggtatttcaagcaaatggactcatccgggtgctttagttgtaaaatccggtggcacaattgacaaaacctgtgacgttcgcattatctacaatcagggttccggtatcagtgtgttagacggaacgcttaccatggatgccggcgttgtttccaaaaatgttgccgaaaagcttacaatcggcggaggcgtatataacaaagggacatttatcatgaattccggtgtttccatttacgataatgatgcttctgttgccggagatgatctttacaacgaagccgaggccacctttactctgcaggatacagacaccatgaatgttaccgatcctcaaacatctgttgacatcacgggatggttctatgacggaaagaaaaatgcagaaaacacaccgcgctggaatgtaaccgagaaaccatactattatgaagaaagctccgaacttgccggcgtttctcagctgactgccttaaaggctgcccatccactggaaaaatacactgttactgtaaattatcttgacaagtcaaccaacgaaaaagtagcgaagtcttatacttttacaaattataaaggcgaacaatacgatgtaaccgcctatgataaaatcaaagtagaaaaatatagttataactccacaaccggcgacaaattatctgacgtttttgacaaggacaaagttattaacgtatggtattctgcagtggtagatattgatgatccagat

SEQ ID NO: 2380 - DNA, 1083 bp, unclassified Ruminococcaceae
atgaataaacgagcgttaattgcgatgagcggcggtgtggacagctcggtagcggcggcgctgatgtgtgaaaacggatatgaatgcatcggtgccaccatgaaactgtatcacaacgaggatgtgggcgttccgaaagcgcatacctgctgtacccttgaggatgtagaggacgcgcgcgatgtcgcgttctctctgaatatgccttattatgtttttaattttaccgacgatttcgccggtcaggtaattgaccgctttgtatccgcatatgaaaacggagcgacgcccaatccctgcattgactgcaaccgctatatgaaatatcagaagctgtatcagcgtgcaaaaatcatggattgtgataccattgtaaccggtcattacgcgcggattgaatatgattccgacaccggacggtggttgctgaaaaaggcgcggaatcttgcgaaggatcagagctatgttctgtattttatgacgcaggagcagttaaagcacacgaagtttccgttgggggattttgcaagcaaggatgaagtccgtaatgttgccgctaaatatgggtttatcaatgcgaaaaagcatgacagccaggatatttgttttgtacaaaacgggaaatacgccgattttattgagcagtataccggaaaaagctatccttcgggttcgtttgtggatttgcggggcaatcaactcggcaggcataaaggaatcattcggtatacggtcggacagcgaaaaggactggggctttctttgccggcaccgatgtatgtctgccgcaaatgtcccgaggacaacacggtggtattatcctccgaaaaggagctttataccaccgagctgattgcggaggatttcaactggattgtcccgccttcgccggaacagtccatcagggttacggcaaaggtgagatacggagcaaaggaagcggcggcttccgcctcggtgttgccggatcaaacggtacgggtgatgtttgacgagccgcagagggctgtgactaaaggacaggcggttgtgctctacgacggagatattgttatgggcggcggaacgatttgcaggggataa

SEQ ID NO: 2381 - DNA, 1482 bp, unclassified Ruminococcaceae
gatgcattgaaagcatggacccgaaaaccgatattcggattatcgaaagagaatgtttatcgtgaggtcattcagtttaatccgaatgcgcataccggtttggtgtcccattgtcataatgcttatattgatgtgctggttgacaccggactgattggatttatcctttttgcagcatttgttttgttgtgtggattgccgattctgaaatatgtttttgtcaaaaaaagaggaccggacgatatcatcatcaagctgttgattactatatttgctatgttgctgatttcaggtttttatgaaacttttatcttgtttaatttgcaggtatttacattagtattgttctcagtattaggatttttaaattacctgctgtttcaatatcaacgtccgcaacatcaggatcgagtattgatttttttaatgggcagctataagcttatgacggctttaacagtgaaaaaacaattttatgccgatcgtccggtagatttggtgttgacctcggaatgtcataccgatgagcaggaactggcgcgcttgaaaagctgcggtgcatttgatgaaatcattgtgataccggcttatccgcggccgaacatcatgcaaaagtggaaaaagtggctcgatttcagaacattgaaaaaacaaataacgtattataactgttatggcgattatttgtatgttgcggattgcgaccctcttctgtatgatttgctgagatatgagaatccccagctgaaagcgtattggctggatgacggaaccggttcatattgccggcagcactgtaacttaagcttgaaacgcagaatgctgtattcggttttgcggtactattatctgcagcaaattgacggtgcatatttgtttgcacctcaaatggatatgctcaaacgagattatccgcgtatcagactgaacaacccgagccatgacttgcagcttttggatatggcagaacaagtctgggatagttcagctgaacaaaaaattgatcaaccggtcatctattttgatcagccgagaaatgcgaaaaagcgggaaaatgattgttatgatccgaaaatagaacagagagaaaacgaattgcttgagctgattatcgaaacgattggagcgaatcaactgggatataaactgcatccccgtaccgatgttgcgacagttccgaatggtgtacatcagctgcctcgggaattgttctgggagcaatactgcagcagggccaaactgtcggataaaattttaatatcggttgattcttcggctttgatgacgccaaaaataatatttgataaggaaccgtatgtcatagcgctatatcgtttatttgaggatcccactatcaatcggacagaaattgatgatctgtttgggaaattgcagacattgtgtgcgccgggaaaagtgttgattccacattctacccaggaactgaagcagatactgcaaaacctgtcggaaaatatttga

SEQ ID NO: 2382 - DNA, 1221 bp, unclassified Ruminococcaceae
atgcatatacgcttccttgaggtgagcgatatgcagaaaaacatgagaaattttacttattacacgccgacgaaagttgttttcggaaaagatgctgaattacaggttgcaaaactgattcaagccgaaaagtgccgcaaggtgttggttcatttcggaggaaaaagcgcaaaggaatcgggattgcttgatcgcatttatcatagcttaaacgaggcgggcatcgattatgtcagcttgggcggtgtggtgccgaatccgcggttgtctaaagtttatgaaggaatcgctctgtgcaaaaaggaaaacgtggactttttgctggcagtcggcggaggaagcgtaatagattccgcaaaagcaatcggctacggtatggcgaatgaatgtgatgtatgggatctttacagtcaaaaatctcgaccatccggttgtctgccggtcggtacagtgctgacgattgctgctgccggtagtgagatgagcgattcttcggtgattacaaatgatatgacctggcagaaaagaggtttgagcagtgactattctcgctgtcgttttgctgtgttaaatccggaacttacctatacgcttcccccttatcagacggcttgcggctgtgtggatattttaatgcataccatggaacgctattttacaaccgataaaaataccggcttgaccgatgaaatcagcgaagcgttgatgcggactgtgcttcataatgctaaaatcgtgattgatcaaccgtatgattataccgcccgtgcagaaatcatgtgggcgggaagtttggcacataacggcttaaccggatgcggcaggacgggtgattgggcgagtcaccaattagagcatgagttaagcggaatgtttgatgtcgcgcatggcgcaggacttgctgcaatatggagcagttgggctcgatatgtttatcaagcggatgcagaacggtttgcacggtttgccgtacaggtcatgggaatttccgagcaatcacaaacgcgggaagagcttgcgctggagggaatctcggcaatggaacggttctatcatcaaatcggtatgccggtttccgtttctgagttgggtattttactgactgaggagcaatgccgccagcttgcttatcattgcagctttgagggcacgcgttccatcggcggatttcggacattaaatcaatccgacatggaacaaatttacaaatcggcgcggtaa

SEQ ID NO: 2383 - DNA, 1065 bp, unclassified Ruminococcaceae
atgaaaagcacgaaaaatccgataaaggatactttattgtcgttttttatacttactgtttcatttgcactgagtttaatgattcagcagttttgtcatacacaatctctcattcctattgtgttcgttttggcggtttttttgatttcgctgaccacatggggttatgcatatggcattatatcctctttaatcagcgtactagcggttaattatgctttcacgtttccgttttttaagtttaattttacaataccggagaatcttttttctgctgtcattatgttgattgttaccattataaccagcgccttgacaaccaagatcatacggcaggaaaaagtaaaagtggaaagcgaaaaagagatcatgcgtgcaaacctgcttcgtgcggtgtcgcatgatttgcggacgccgcttacaagtatttacggttcttgctctgctatcatagagaattatgacagactttccaaagagcagcatttgaagctgctcggcgaaatgagtgaggatgcggaatggttaatacagatggtggaaaatcttttgtcggttactcggattgacgggcaaaaaattaatgtcgtaaaaacaccgactgtgcttgaagaattgattgatgccgttgtggtcaagtttcataaaagatatccaaagcaggatattagggttgaaatcccggatgattttatcagtattccgatggatgcgatgctcattcagcaggtaattgtaaatattcttgaaaatgcagtacagcatgcacaaggaatgcgggaactttctctgaaggtgtttacagcagggaatcatgccgtttttgaaattgcggatgacggatgcggtattcctccggaacgattggaggacctttttaccggatacctggaaacaaaaggtgcttcagcggatcataaaaagcataatatggggatcggattgtctgtctgtgcgacgatcattaaggcgcacggaggaactatctgcgccgaaaatcgcaaatcggggggcgctgtttttcgattctcattggatttggaggactcggaagatgagcaataa

SEQ ID NO: 2384 - DNA, 663 bp, unclassified Ruminococcaceae
atgttgaacccgaaacaaaaggattcaattatggtcacgaagatgaagatgccaaagataaattttcaaaaattatttgacaataataaacttattatcgtgttatcgtttattattgccattacagcgctgtttgttgtcaaaacggtagtaagcccggagggaaatgttaaaatttccaatgtccccattacgattaatctggatggatcaacagctgctacgtcaggattaaaggtaatttccaaagaggttgatacggtaacggctgttatcagcggaaaaagctattgggtcgggaatttaaccgcagatgatatttcggtgacagcaagggtggtagatgtaaccaaagccggagagtacacactggatttatcagtagctttgttgccggaagcgcaaaaggattctgattataaaatcgaagtgaagccggatcaagtgaaggtacggtttgacaccattgtttcgcaggaatttccgattacggtggaaaccggaaaaattgaggttggcgaaggattaattgtggatactgcttttgcacaacctgaaaaaatcacggtgagcggtccgcaaaaagatgtggaaacaattgccaaatgtgtggcaaagaccgaagcagtcggtcatgtttcggaaacggtggttaaaaaaggc

SEQ ID NO: 2385 - DNA, 1236 bp, unclassified Ruminococcaceae
atgagagtgaattttaaaggatttgattttgttgacggcggaatttgcgcgccggcaggatttcaagcggcaggaatacactgcggaatccgtaaaaataaagacaagcgagatttggcgttgatttacagtgaagatatctgtacggcggcggccatttatacacagaacaaggttaagggggcgccgattgccgtaacaaaaaagaatatcaaaaacggcaaagcccaagcgattattgtaaacagcggaaatgccaatacctgtaatgccgacggagagcaaaaagcgcagatgatgtgtgatttaacggcaaaagcgctcggcatcaatcagcaggatgtgattgttgcttctaccggcgtcattggtcaggtgctggatattgaaccgattcaagacggtatgccgcaattggtgtcagagctttccgacggcggaagcaacaatgccgctgaagcgattatgaccaccgacacggtaaaaaaagaaattgcggtagagtttcatatgggtgatgccgtttgtaaaatcgccggtattgccaagggaagcggcatgatccatccgaatatggcaaccatgctttgctttattaccaccgatgtggcaattgaagcggaattactgcaatcggctttaaaaaaggtggcggacgacacgttcaatatggtaagtattgacggtgacacctcgaccaatgatatggcatgcgtactggcttccggaaaagcgggaaatccactcattgataagcaggataataactatgaaattttcattaatgcgctttatgtggttttgatgaatctgtcccgtgaaattgcggctgacggtgagggcgcaaccaaactgttagaatgtcatgtgacgggagcagatgacgagcagaccgcaaaaaaagtagcaaaatcggtcattacttccagcttgtttaagtctgcaatgttcggcgcagatgcaaattggggcagaatattatgcgccatcgggtatgcggatgcagaattcaatattggcgaggtcagtgttcagcttgcgtctgcaaagggctgtattcgggtttgtgaatatggagccggggttgactttagcgaagaaaccgcaaaagaaattttgctggaggatgaaatcaaaattattgtcagtctcggaaaaggtaaatattctgcggtggcatggggctgtgatttgacctatgattatgtaaaaatcaacggtgattaccggacttaa

SEQ ID NO: 2386 - DNA, 1821 bp, unclassified Ruminococcaceae
atgcagggaaacaggtggattttagaaaacgataaaataatatggaattgcagcggagacagccatcttgataccatcgaaatggcaggtaatcagattgctgcaatcgtgacatacggtgtaaatgataccgggacgctttctttgcatcgggagctgcggtatccgctgctccgcacattgccaaaagatacttacgcaaccctggggtgccatcacgagcaaatacagtcttttagcatagacggcaaaacaatacaggagtatcccgagcggtttgtttttgatggggttgtccatgtttattccaaggatgcagacaataaggtagtgatcaagcgttctctgtttccctgccgtaacagcaaggcttatgttgaacatgtgacgatcactaattgctcccaaaaaccggtgattgtgtcaagtgaagccatctgtgaacgccgctttgagcggggtgctaagggtgtttatccggtagatattgatagcagagcaatggcgggggttacacttgtgccgggggacagcgttgtcaatgacctgatcttcagcgcacgactgccgatggaaaaaccgattagattggacggagcctctgagttggcggccagaatggatctggtacatcagatgttttcagattgtttggatttggaaacaggcgatgataaattagattgtatgtttcgctttgccaagctaagagcggcagaaagcatttttgacacagcggcaggaccgcttcattctccgggcggcggcgcttactatgctgcggtttggacaaatgatcaaattgaatatgccggacctctttttccgtttttgggctatgatcgggcaaatacagccagtgaaaatgcttttaaactctatctgccgtttatgggtgaaaacctgtatcgcataccatcctctatcatagatgaaggtaatgatctttgggagggagcaggcgaccgcggggattcagcgatgtatctatatggtgtcacccggttcttattggcgtacgggaaacaggaaacggcagagcaatattgggatgctattgattggtgtgtgcgctattgtcgcttaaaagtgaatgaagacggtgtaatcgcttctgattccgacgagctggaggaaaggtttgcatcgggcgacgccaatctctgtacttcctgtttgacttatgcgggattgatttcggcagcagatattgccgcagagcttggaaaacaggataagcaaaaagaatatctggagtttgcagcaatgctacgcaaaaatatagaacgctttttcggggcggaggtttccggatatcagacttatcgttattacaaggaaaatacattgctgcggtcctggatttgcatccctctgacaatgggaatcttagacagaaaagaagaaacgatccgcgcattgctgtcggatagactgttcggaaaagacggcttggtctgtgaagagggcaatgatactttttgggatcgctctacattgtatgcgctgagaggcattttgaatgccggacatagcgatgaagtgtatcaatttctggaatactatgtaaataaacgcctgttgaccgagcatgtaccttatgctgtggaagcgtatcccgaaggaaatcagaggcatttgtcagcagaaagcgcgctttttgtccgagtgattaccgagggaatgtttggttttgtgccgcgcggcttccgctcgtttgaactgcatccgtccgttccgaaggcgttgaaacggattaccttgaaaaacattcgcgctttcggaaactgctttaccgtaacggtagaacacgccggagac

SEQ ID NO: 2387 - DNA, 1335 bp, unclassified Ruminococcaceae
atggttattcttatggttaaaattacttttatgggagccggaagtacagtctttgccaaaaatgtattgggcgactgtttatgctctcctgctttaaacgaggcagaaatcgctctttatgatattgatgccgaacggctaaaggacagcgaaatgatgctgagcaccatcaaccacaacagcaacaatgacagagcaacaatcaaaagctatttaggagtggaaaaccgcaaggaagctctgcgcaacgccaactttgtggtaaatgccattcaagtgggattatatgatccttgtaccatcatcgactttgaggtgcccaaaaaattcggtctgcgtcagaccattgcagacactttgggcatcggaggcatcatgcgtgcgttgcgtaccattccggtactagacgactttgccagagatatgcaagaggtttgcccgggtgcatggttcttaaattataccaatcctatggcgatgctgtccggatttatgcaacgctacgccggtataaaaaccatcggactttgtcacagtgttcagtcctgctctgagggtttactgagaggtctgggaatggaagacaaactggaaggcagaaaagaactgatcgccggcatcaatcatatgggatggctgttggaaatcagtgacaaagacggaaatgacctataccctgaaattcgcagacgagcaaaagagaaaaacgcaaatgaaaagcacggcgatatggttcgatatgactatattgacaaattaggttattattgcacggaatccagtgaacataacgcagaatacaatatgttttacataaaatccaaatatccggaattaatcgagcgattcaatatcccgttagacgaatatccgagaagatgcgtaaaccaaatcgcaggctggaaaaagcaaaaagaagaaatcgtgcacaatcacaccctcagtcatgaacggacacatgaatacgcttcctatattatggaatccatggtaaccggcgagccttacaaaatcggcggcaatgtactgaacacaggcggtttaatcgaaaatctgcctcaagatgcctgcgtagaagtgccctgtttggtagacgggaacggtattcatccgtgccgcgtaggacgtttaccggtacagcttgcagcgatgaacatgacaaacatcaatgtacagttgctgaccatcgaggcggctgtcacccgtaaaaaagaacacatttatcaagcagctatgctagagccccataccgccagtgaattatctattgatgacatcatcaaattagtggacgctttaatcgacgcacatggtgactggctgccaaaatttaat

SEQ ID NO: 2388 - DNA, 1569 bp, unclassified Ruminococcaceae
atgatgctaataaaacaagggggaaatagcgtgggcgttgatgcagcgatcgaactcagaaatataaccaaacgtttcggaagcgttgttgcaaacaataatgtatgccttactgttaacagaggggaaatcctttccatcttaggcgagaacggcagcgggaaaacaaccttgatgaatatgatatcggggatttatttcccggatgagggacgcattttcattgacggagaggaagtcatgatccgttctccgaaagatgctttccggtatcggattggtatgatccatcaacatttcaaattggttgacgtttttactgccaccgaaaacattgtactcggactgaaagaaaaagggcgctttaacatcaaaaaagcagcggaacgtgtgcgggaaatcagtgagaagtatggatttgaaatggatccgatgaaaaaaatatatgagatgtcggtttctgaaaaacaaacggtcgagatcatcaaagttctgtaccgcggtgccgatattttaatacttgacgagccgacggctgttttgactccccaggaaacagaaaagttgtttgcggttttgcgtcggatgcgcgacgacggaaaagcaattattatcattacacacaagcttcatgaagttttatcgctttcggaccgtgtatcagtgcttagaaagggcgaatacatcgataccgttaaaacttccgaaacaaatgaatcacaactgactgaaatgatggtcggtaaaaaaatcagcctcaacattaaacggagtgaacctgtcaatcccgtcgatcgcttggtcgtaaaaaatatcaactgcgtcaattgggaaggcataaaattactggataacatttctttcactgcccgttcaggtgaaatactgggtattgcaggtattgcaggcagcggacagcgggaactgcttgaggcgattgccggtcttcagcatcttgatgaaggagaaattctctatcacaatcctaaaaccggaaataccgatgatttgcgcgacaaaacaccgatgcagatccgtgatctcggtgtccgcctttcttttgtgccggaggatcgtctcggcatgggattagtcggaaatatggacattatcgacaacatgatgctgcgtagctatagaaaagggaaatcggtttttctggaacgaaaagcgccgaaatcacttgccgaacaaattattgatcagcttgaagtcgtaacgcccagtgcaacaacaccggttcgacgtctctcgggcggtaatgtgcaaaaagttctggtcggccgtgaaattgccgcatcccctactgttctgatggcggcatatccggtgcgaggtttggatattaactcctcctataccatatataatttactgaatcagcaaaaagagcgcggtgtcgcagttatttttgtgggagaagaccttgatgtactgctggaactgtgtgaccggattatggtaatcggttcaggcaaaatcaacggaatgatagacggcagaaccgctactaaagaacaaatcggacttttgatgacaagaaagaacgggggtgcacaaaatgagtaa

SEQ ID NO: 2389 - DNA, 1368 bp, unclassified Ruminococcaceae
atgaaacaaatgtcacgtcgttctatacttttgcttatcattatgctttgttttaccgcgggcttagtcatattaggcgttgtttttgcaataaacgcatccggttggacttcttatccggcaaaccgccatatttacaacagcaaagcaatattatcaggcgccggcagtattaccgaccgcaatggaattgttttggcacaaaccatagacggtgacagagtatacaacaatgacaaaaatatccgcaaagccttattacacacggtaggagattcctccggattaattaaaaccggtctgcaaaacagctattggaaaaagctggtgggctataatttagtaaacggcgtatttcagcccagcggtcaaggaaatgatattactctgacgttagacgccaatctttgtgccacagcgttaaaagcgcttggaaaatacagcggtacagtaggcgtttacaactataagaccggtgaaatgctctgtatggtcagtacaccaacctatgatatcaataatccgcctgaaatctccgaagaagatgaaaaatataccggcgtttatctgaaccggtttctttcttcttcctacacgcccggttccactttcaaagtagtaaccgcagcggcggcactgcaaacctttgatgaaatggaaaacatggagtttacctgcaatgccggtgttgaaattgagggcgaatgggtcagctgtttaagcaaacacggcaccttaaaattcaaagatgcgcttgcaaaatcctgcaacgcttattttgcacagcttgcggtaaagctaggacccgaaaacctaaagaactatgccgaaaaaatgggcttcaatcagacttttaaactggacggcattaccgcaaaaaaaagtaccatcgattactcaaatatacgcaatatcgatctggcatgggctggaatgggacaatacaccaccttggtcaacccgctccaatatcttaccatggtcggtgcaattgcaaatgatggtgttcctgtcaagccctatatcatagaaagtattacctcccctgccggactgccgctccatttcaagctttccaagaccgacagccgaatgctcagcacagaagcagcccgtacacttgctgaaatgatgcgttacaccgtgaaaaccaattacaaagacagcagtttcccggaacttaacgtttgcgctaaaaccggcaccgccgaagtaggaaaacacgccgtcccgcattcctggatgattgggtttgtccgggatgaaagtttgccgcttgcttttgccgtcgttgccgaaaatgcgggaagcggaagccgagtcgcgctacagattgccaacacggtattacaggcggctaaaaaataa

SEQ ID NO: 2390 - DNA, 1758 bp, unclassified Ruminococcaceae
agagaagatttgcgtaacgtcgcaatcatcgcccacgttgaccacggaaaaactacattggtagatgaaatgttaaaacaaggtggtgctttccgtgaaaatcaggtagtggaagaccgtgttatggattccaacgatctggaacgggagcgcggcatcacaattttagccaaaaacacggcagcgcattataaaggcgtaaaaatcaacatcattgatacccccggacacgcagatttcggcggtgaagtagagcgtgtgctcaagatggtaaacggtgtgcttctgttagtagatgcagcggaaggtcccatgccacaaacccgttttgtactgcaaaaagcattggaattaggacatcgtattattgttatcgtaaataaaatcgaccgtccggatgcccgtctggacgaaattgcagatgaggtgcttgaactgctgctggatttggacgccagtgaagagcagctggaaagcccgattttattctgttccggccgttccggtaccgcttccttgtcccaatatgaagccggcactgatttggttcctttgtttgacaccatattggattatatccctgcgcccgaaggcgatccggatgatgatttgcaattactggtatcttctatcgattacaatgaatatgtcggacgaattgcaatcggcagagtggaaagaggcgtcatcaagcaaaatcaagaagtgatggtttctgactatcataacagcaaagaaccttatcgcggaaaaattgtcaatatgtatcagatagaaggattaaaccgtgttccggttgatactgccacagttggagacattgtttgtttttcgggtattgaaaaaattaccatcggtgataccatcacttcaatcacaaaagtggaacctttgccttttgtaaaaatcagtgaacccactgtggaaatgactttttcggtcaacgacagtccgtttgcaggacgggaaggcaagtttgtcacctcacgtcagctgcgcgaccggttgtttaaagagcttctcaaagatgtttcattgcgtgtatccgaaaccgatacaaccgaaagctttattgtcagcgggcgcggtgaaatgcacttgtctattctgattgagacgatgcgtcgggaaggctttgagctggctgtcagcacacccagagtattgttcaaagagatagacggcaagaaatgtgaaccgattgaacgtcttttaattgatgttcccgaagagtatatgggaacggtcatggaaaagatgggcgcacgcaaaggcgaaattgtcagtatgcatccgcaaggctctcgtatgagaatggaatttttgattccgtctcgcggcttgttcggttatcgaaatgaattcatgactgacacgaaaggggacggaattttaaatacgttgtttgacagctatcagccgtataaaggcgatattccccgccgtgcttccggatctttaatttcctttgaaaccggtgaggcggtcacttacgggctgtataacgcacaggaacgcggtactctgttcattggtgcaggtactccggtatatgaaggaatggtagtcggcgcatcaccgaaagcagaggatttagtagtaaacgtctgtaaaaagaaacacgtcacgaatatgcgtgcctccggctccgatgaagcgctacgtttggtaacgcctcgcattttcagcttggaagaatccattgaatttttagcagaggacgagctgttggaggtaactccaaaaagccttcgtatc

SEQ ID NO: 2391 - DNA, 1380 bp, unclassified Ruminococcaceae
acgatcttactggataaatttccgctgaatatcgaccttacaaaagaacaatccatgtccatggcggaggactccaaggacttcctgaaaaagctggacaaagaggtaaaaatccacgtgcttgcggaggaatccacctttaaccaagctggcaatttctactatacccacgcgctcaataccatgaaacagtgcacccaatattccggcaaggtttctcttgactttattaacttagagaaaaaccccacctacggcaccggaaaatattccgagagtctgcaagccggcaatatcatcattgaatccgacctgcgctataaaattgtcagcattgaggatttattcgaagtgacttatgcggagaccgattactatcagcaaaacccgcagatttcttcctcaaaagcagagcaagtgatgctcagcggcattatgtttgtatccgaaaccaatcctaccgaagtcactttgctgaccggattttccgaagtacaaggcggttacagcggtattcaatccttgctggaaagcaacaattacagctttaaaaccgtcaacattttgaccgaagatattccggattcttcaaacatggttattatcccggctcctaccaaagattacacgcaaaaagaaatcgacaaactggaaaccttcttgggaaacaacggcaagaacgggaaaaagctgatttatcttgcttcttatcagcaaggcaatcttcctattttagagggttatcttgaaactgactggggcattaaaatcggcagcggcgttatttgggaaacaaatgcttccaatgtttatggttattcttactacaacaccttaaacaccctgaccggcaacggatataccgatggcttggcagacagcacacttccggtttacatgagcgcttcccgtccggttaccgctgcttttgaaacgaaaagcgaaatgaaaaccacttctttaatcacctccgctgatacctgtgtattgcaaccgatggacgccggtgaagattggactcctgataatgaaacaaagcaggcgtttactactgctgtttcctgtactcgtacaaaatacgattccgacaccaatgaagcactggaatccaccgttgttgcattcggcagcctggatttcttcgtttcaggtgcattgcagatggacacctttaacaacggtgattttaccgtaaacatgtgcaatgatttagtcggcaaagaagacaacacattaaacatcgttccgaaatccgacagttccgaaacacttgatattaccgaagcaacagtaaaagtattccagattatcttcgtaatcgtcgttccgattgcggtactcgcaaccggtttgatcatttggttcagaaggagacacaga

SEQ ID NO: 2392 - DNA, 2082 bp, unclassified Ruminococcaceae
atggcgaatttagtaattgttgagtcacctacaaaaattaaaggtattaagaaatatttaggcagaaactatgaagtggttgccaccaaaggacatatccgtgatttgccgaaaagcaagttcggtatcgatattgaaaatgactttgaaccgaaatatatcaacgtggttggcaagggagatgtcattaaggatctgaagaaacaggcaaagaaatgcagtaaagtatatctcgcgaccgacccggatagagagggcgaggcaatttcatggcaccttgcacatatcttaggtttatcgctggaggatgcaaaccgcgttacttttaatgagatcaccaaaaccggtgtaaaggcaggaatgagcgagccgcgtaaaattgatcttgatttagtggatgcacagcaggcgcgccgggtgcttgatcgggttgtcggttatcagctcagcccgtttttatggaaaaaagtacgttccggattgtcagcagggcgggtgcaatcggttgcagtgcgcattattgtagaccgagaagaagaaattcggaattttgtggaagaagaatactggacgattgatgcactgttttctgctaaagattccgctaagccatttcctgcaaaattttatggaacggaaaaggaaaaaatagagatcaaaaccaaagaagaatccgataaaattcttgcggagcttaacagtacggactacgctgtaaaagatgtaaaaaaaggtgttcgcaaaaaatcgcctgctgctccgtttaccacctctacgatgcagcaggaggcggcaagaaaactcgggtatcaggcaaaacgtaccatgaaggttgcgcaggagctttatgaaggcgtagatttgccgaagctgggtgcagtcggtctaattacttatatgagaacagacagcttgcgtatttctgaagaggcaagcaaagcggcgaacgaatatatcaaaacaacctacggggaaaagtatctgcctcaaacgccgaatgtgtataaatcaaaatctaatgcccaggatgcgcatgaagcgattcgtccgactatgccggaactgaatccgaatgaaataaaggacagtttgacgagtgagcagtttaagctgtataaactgatttgggaacgttttatcgccagtcaaatggaggctgcggttttggatacggtttctgtgaatattaaagcaggaaagtatctttttaaagcatcgggatatacggttcgctttgacggatttacggtgctttatgaggaaggtaaggacggtgaaagcgaaaagcaggtgattttgccgaagttggaatccggagatgcgctcgccccggtcagcttgctcggcaatcagcatttcacccagccgccggcaagatataccgaagcaacgctgattaaagcactggaagaaaacggaatcggacgtccgagcacctacgcgcctaccatttcgacaattttgaccagaaactatgttcagcgggaaggaaagcaaatcaaacctactgaattaggtgaggtagtaactcgtttaatggaggatcattttaataatattgttgatgtcaagttcacggcgaatatggaaaaagagctggatcttgtcgaggaaggcaggatgaaatggaaagacacaatccgtgaattttacggagatttttccgattccctaaaaaaagcagaggttgaactgggcgacgaacgaattaatgttccggacgaagtgaccgatattgattgtgaactctgcggtaaaaaaatggttgtaaagatgggaagattcgggaagtttttggcgtgttccggttatccggagtgtaaaaacacaaagagaattgtggtagaaaccaagggaatctgtccgttatgcggcggaaaaatattggagaaaaagtctaaaaagggaaaaaaatattttggctgcgaacacaatccgaaatgcggttttatgacttgggatgaaccgacaggagaaaaatgtccgaattgcggcgcttctctgctgaaaaaatacggtaaggcaggcaaaatttattgttccaaagaggaatgcggctttgagaagggcttaaaggaataa

SEQ ID NO: 2393 - DNA, 1773 bp, unclassified Ruminococcaceae
gatagggtaaaaatttcgcagaagaactggatcggacgttccaccggtgcggaagttgattttatgactaccgccggagataaattgaccgtttatacaacccgtccggataccttgttcggagcgacctatatggttatttctccggaacatccattgattgaaaaatgggcggaccggttggaaaatatgtcagatatcaaagcttatcaggaagaagccgctaagaaatctgattttgagcggacagagcttgtgaaagataaaaccggtgtagaattaaaaggtgtaatgggaatcaatccggtcaacggaaaagaaattccgatttttatttccgattatgttttggtgtcttacggaacgggagccattatggcagtacccggacatgataccagggactatgattttgcgaaaaaattcaatctgccgattatcgaagtggtaagcggcggaaatgtggaagaagcagcctttaccgattgcgaaaccggcattatggtcaattccggtatgttaaacggaatgtcggtagaagaagctaaaaaatccattattgcatggctggaaaaagaaggaaaaggtcataccaaagtcaacttcaaattgcgtgactgggtattttccagacagcgttattggggagaacccattcctattatctattgtgagcattgcggatatgttccggtgccggaaaatgaacttcctctgatgctgccggaggttgattcttatgagccgactgacgacggagagtcgccgctatctacgatggatagttttgtaaataccacctgcccggtttgcggtgctcctgcaaagagagaaaccgatactatgccgcagtgggcgggttcttcgtggtattttatgcgctattgtgatccggacaacatggatgctttggcagcgaaggaagcgttggattactggctaccggttgattggtataacggtggcatggagcatacaacgctacatctgctgtattcgcgtttctggcataaattcttgtatgatattggtgtggtcagttgtaaagaaccgtatcaaaaacgtaccagccatggtatgattctgggcgaaaacggggaaaagatgagtaaatcccgcggtaacgtagtcaatccggacgatattgtgaaagaatacggcgcagatactttgcgtatgtatgagatgtttatcggagattttgaaaagtccgcaccgtggagctctgccagcataaaaggctgtaaacgctttttggaaaagatatggagcctgcaggattgcttgattgaaggggattcatatcgcaaagagctggaagtgtctttccataaaaccataaaaaaagtaacagaggacattgaatcgctgaaattcaatactgcaatcgcagcgatgatggcactgttaaatgatattcaggatgtcggcacaatcaacaggaaagaatatactgatctcttgattatgctcaacccttttgcaccgcatgttaccgaggaaatttatcagttgttgggtaatcaggatatgattgcgcacagcagttgggtgcagtatgatgagagcaagtgtgtcgagaatacggttgagatcgcactgcaagtcaacggtaagctgaaatccaaattgatgattccggcagatgcagcaaaggatgaggttcttgctttggcgaagaacaacgaaaaaattaaagaaattttagcagataaaacgattgtgaaagaaatatacgttccgggaaaaatcgtgaacattgttgttcgttag

SEQ ID NO: 2394 - DNA, 1824 bp, unclassified Ruminococcaceae
atgggaagcaagcggctgtacagcaatcagtacagcaatcagagtggtaccgcggaagcaactgccttcgtctcttttgtcaataaagagaacgagggcttttttgtatttattttgaatattaccgaaaagaaaggattttatgttgtcatgaaattaaatggttcagaaatacttttagaatgtttgttggaacaaggcgtggataccgtctttggatacccgggcggatcggtcttgaatatttacgacgccttgtataaatacagcgataaaataacccatattttaacagcgcatgagcagggcgcctgtcatgcagcagacggatatgcacgctccagtggaagaaccggtgttgtgattgctacatcgggtcccggcgctaccaatttggtaacaggaattgccaccgcctatatggattccattccgttagttgccattaccggtaatgtgccggtcagcctattggggctggacagctttcaggaagtagatattgccggtatcaccatgccggtgaccaagcataattatattgtaaaagatgtaagagaacttgcagatactgttcgggaagcattttatattgcaaatgagggcagaaaaggtccggtactgattgacataccaaaggatgttacggcaaatttgtgtgaatacacgaaaaaagagccggagccgattgcgtccgggaaaacaatagaagctttcgaagtgaatcaggcaattgcactgctgaaaaaggcaaaacgcccttttgtttacaccggcggaggtgttatcctttcagatgcacagcaggaagtgaaaacgtttgtagaacgctgtgatgcagttgtttcgtcttctttaatgggacagggtggatttgataataccgatctgcgttatatgggtatgctcggaatgcatgggtcaaaaacttcctctttagcaatcactgattgcgatctttttgtcggaatcggtactcggttcagcgatcgagttatctgtgatattaaatcttttgctcccaacgcagacatattgcatattgatattgattctactgaaattaataaaaatattaaagttggttatcagatcatcggtgacgtaaagcaggtgctaaagctgattaatgaacaattgccgcagcaagctcatcccgactggattcaacagattgtcgcatggaaagcggaatatccgctgatgcagcaggggcaaactaccgattcggtcgtgccgcaggaggtcattgaaatccttgataggctgaccgagggggaggcaattattgctactgaggttggacagcatcaaatgtgggcagcacagttttataacttcaggcatccgcatcagtttgtatcttcaggcggattgggcacgatgggcttcggattcggcgcggcaatcggtgcaaaagtggcaaatccggataaaaaggtcgtaaatattgccggagacggcagtttccatatgaatctgaatgaattggttaccatttcaaaatatcagattccggtagtggagttggtgtttaataataacgtgcttggtatggtacggcagtggcagaaattgttttatgaccggcgtttttcgcagaccacgctggaacgtcctaccgattatctgaagctgggagaggcttttggcgtcaaggcgttggtaatcgaaaagagagaagagatagaaccggttctgcgcgaggctcttaccggcaatcaaccggtgttgatcgaatgccgcattgacaaagacattaatgtgttgccgatggttccggcaggaggatcaatcagtgagccgattttggaaatgaactaa

SEQ ID NO: 2395 - DNA, 1566 bp, unclassified Ruminococcaceae
ggagcagaagtcaattataacggaaaaagctacatagcctacggaatatgcgacgacatcaatgaccgggtatatatgctttatttcagtgagacgacccagctcaaaaagctggcggaggaatatttgcagactcggcctgttgtgatgttgattttaattgacaattacgaggaattgctgcaaaatgcgaaggaaagtgaaaagtcacagcttttggggcagatcgattatctgttagaggagtttatttctaaaaccaacggctttatccgcaagctggatcgagaccgttttattgccgttattgaagaacatcacttggcaaagctggctgaagagagatttccgattcttgacgcggcgcggcagctccaaacggcttatcgctatccagttactttgtctatcggaattggcagaggcgggaagagcatggcagagagcgaggtttggtcaaggcaggcaattgatatggcactgggacgcggcggagaccaagtggcaatcaaaaatgcaaccggttttgaattttttggcggggtatccaagggcgtggagaagcgcactaaggttaaaacccgtattattgccaatgcgttggcggaattaatggaaacaagcgacaacgtgattgtgatgggacacaaattcggcgatctcgacagtatgggatcgtccattgcaatggcaatggcggcgcgctgtttgaacaaacacagtgtggtttgcgtagatcggcatcataacttggcgacctgcctgatagaccggcaggaaaaaagcggaatcactgatttgtttgtggaagaaagcgaagcgttggggatgataacgccccgcacgcttttgatcatactggacacccacaatccgggctttgtcgagtcaggcaaattatatgaaagctgtaagacggtggtggtgatcgatcaccatcgaaaaatggtcaatcatattgataatgcggtgatattctaccatgagccttttgcctcctcggcatctgaaatggtcaccgagctgcttcaatatctgggggacggcgttgttgtcaaccgcgcggaagcggaagcattgttggcgggaattatgctggatactaagaatttcgttcttaaaaccggcgtgcgcacctttgaggcggcggcttttttacggcgcatgggagcagatacggtagaggtgcggaagctgtttgccggcagcatggaatcttatcaaagaaaaacaaagttggttgcctctgcgcagatttataaaagatgcgcgattgcctgcagtaatttttcttctgatgatttgcggattgtagctccccaagcggcagacgaattgctcaatatcagcggtgtagacgcttcttttgtactatatgaggtaggagacggcgtcagcatctccgctcgctccatggggcagatgaatgtgcagattattatggagatgatgggcggcggcggtcatttgacgatggcaggcgcacaagtggaatgcgaaagcgcagaaaaggtaaaacaactgttgctgacagcaattgataagtatacagaaagtttgaaataa

SEQ ID NO: 2396 - DNA, 1257 bp, unclassified Ruminococcaceae
atgaaccgcaaggttattgattgtattgacagatatcatatgctgtctcctcacgaccatgttgttgtgggggtttccggcggtgccgattctttggcactgctgtattttttagtacacgaactgccggattatcagctgcggatcacagcctgccatatcaatcatctgctgcgcggagaggagagcatgcgggatcagaagcacgtggaagaattatgcgcgcagtggggtgttccgctgcgggcagagcagattgacatccggctgattgcacagcagcacggacagagtttagaggaagcaggcagagaggaacgctatcggatttttgcagaatctgccggcgcagagggaaaaattgccaccgcgcatacgctgtcggacagctttgaaacacagttgtttaatctggttcgaggctgcggcggcaaaggactttgcggaattccgccggtgcgggacaatattattcgcccgttgattatgatttcgcgggaggaaacagaagcgtactgctgcgcgcacggtatcgcttttgttaccgacagcaccaatttggatacggcttacagccgaaacaaactgcggctggaagtaattccgagactgcgtgaagttaattccagggcggctgttcatgcggcgcggttaggacaatcgctgtcagaggatcaggactttttggaacaggcagctgctgaaaaatggctgcaaatcagcgaggagaatcagctttcggtttccggcttgtgtgattgccatccggcagttatgcggcgggtgctgatgctttggctgcaaaaaaacggcatagattatgattttcagacgctcgacagaatttccgaaattgttcgttccggctgcggtaaaatcaatattaccggcgattttttttgtgcttgtcaaaacgggaagctgacgctttcgaagagggcggagaagacaccgtattttgaatttccgttggaaacaaaagagatcaaaatgccttcgggcaaaaaatacagattttggatcaaaaacaaggaggattttatccgcattcaagaaatattcaagaattccacatataaactccttgattatgataaaataattggtaaactaataataagacaaagacgaagcggcgaccaatttcgtatatttgacagacatattacaaaaagtataaaaaaactgttcaatgaagcgaaaattccacaagaaatgcgtgaaaaaatctttctaatctgcgatgaacgtggtata

SEQ ID NO: 2397 - DNA, 1299 bp, unclassified Ruminococcaceae
atgctgaaattgataaaaaggcaatcgccggggcggattattgcacttggttttgcgttggtgattttgattggctccattttattgatccttccgtgcagtgtgcaagatggtgttacggtcagatatattgatgctctgtatacttctaccagtgctgtttgtgttacaggtctgattgcaatagatgcgggagacacctttacggcggtaggacagttttttcttgcggctctgattcaagtcggaggtcttggcgttaccgctgtcggcgcggggattattctggcaatgggcaaaagagtaaatttgaaagaaagaaatttaattcgtgaagcgatgaacttgaattcaggaaagggacttgttaattttgtaaaatctattttcctgacaacagtgatttttgagctgacgggggcgcttctcagttttactgtttttgtgcgcgattatccgccgttagaagcactgggtatcagtctgtttcattcggtggcagcatttaataattccggctttgatatactcggtaattatcaaaatttgattccttatcgtgataatgtgatgttaaatttggttacctgcggattaattatattcggcggtatcggatttttggtaattcgggaactctggacaacaagattgtgctggcgcaagctgtctatgcacgccaaagtggttttgagtgtcagtgcagctttgattattacaggaactgtgttgttgaaattgacagagaatgttacttggctgggagctttttttcagagcgtgtctgccagaacagccggtttttctacttatccgcttcggactttctcgacacccggtttgttggtgttagttgttttaatgttcatcggtgcttctccgggatccacgggcggcggcatcaaaaccagcactttttttgtgcttttacaggggataaaaacagcggcgaccaataaaacgggaaaggcttttcactattcggttccccgggatgcgttccgcaaagcggcaattatcactatcctttccatttcggttgttataaccggtgtttatttgatggctgtgatggaacctgatttttccttaacggatattttatttgaagtaaccagtgcctttggtacggttggtttgtctaccgggattacaccggatttgtgtgacggcagcaagctgctgtctattgcaattatgtatatcggacggctgggaccattgacggttgcttctttgtggtatttcacaatgggggagcgaatcagctacccggaaggtaatattgcaatcggttaa

SEQ ID NO: 2398 - DNA, 1869 bp, unclassified Ruminococcaceae
attacaccggtcaatcaccgccaaaacaccaagcaggattgggagcggcatctttcggatttaaatgtatgttctcaaaaaggactggtagagcgttttgattccaccatcggtgcaggaaccgtaataatgccgttcggcggcgcctatcagatgacgcccacacaggcaatggttgcaaaaataccggtgttaaagggagaaacctccacttcttcggtaatgggctggggattcaacccatacatcagtgaacaaagtccctatcacggtgcaatgcttgcagtcattgaatcggttgcaaaagttgttgctgccggcggaagctataaaaaatgctgggcatctttccaggaatattttgaacgcacacaaaacaatccggttcgttggggaaagccctttactgcgctgttaggtgcttacaaagcgcaaaccgaactgggtattgcggcaatcggcggtaaagactcgatgtccggaacttttgaaaacattgatgttcctccgactctggtgtctttcgctgtttcggtaaccgactcaacaaaagcagtatcccaggaatttaagcaaagaggaaatcgggttgctgttatcctgccacgttatgatgaaaataatctcccctgctttgacagtgtgaaatccgtatttaaccaaattgagtcgctaatcagtcaagaaatggtcaaatccatctggactttgtctttcggcggtgttgctgaaggaattgcaaaaatggcgttcggaaaccgtatcggtttccgctttgcagaaaatgtttcaaatgaattgttatttaatgctgtatacggcggttttattgtggaattagacgaacgagctgacatatccggcgatttcaaagtaatcggttatacagccgatgaatacactattacgttatttgataaaacagtattgtcactttcagaactgcaggaaaaatacgaggccaagctggaacctgttttcccgacgcttgcagctcatccggataataaaattacagtctatgcatatcctgctacacagagaaagatgcctgctgtaaaaacagcaaagccacgagtcttaataccggtatttccgggaacaaactgtgaatatgacactgcgaaggccttcgagaaagcaggcgcagaggcagaaatttttgtcatcaaaaatttatccagttcattaatggagcagtcggtgaacgcttttgctcaaaaagtaacagattcacaaattattatgattcccggcggattttcaggcggtgatgaaccggatggatccggtaaatttattaccgcatttttccgaaaccccaagataaaagatgctgttcatgagctgttaaaaaaccgtgacggtttgatgctcggtatatgcaacggtttccaggcgctcattaaactcggattggttccgtttggcgaaattgttgagatgaaagacaattcaccaaccctgacctttaataccattggtcgtcatcaatccatgatggtcaacaccagaatcgcttccaacaaatctccctggctgatgaacacacaggtcggtgatattcataacgtggcaatatcccatggagaaggccgatttattgctgattccaaattggtaaagcaattagctgagaacggccaaattgcaacgcagtatgtggatttatcaggcaatcctacctacgatattcgattcaaccccaatgcctcaattgacgccatcgagggcatcacctctccggacggtcgtgtattaggtaagatggcgcacagcgagcgcatcggcactgatatcaccaaaaacgtcccaggtaacaaggatcagcatattttccaatccggcgtagaatattttacaaaataa

SEQ ID NO: 2399 - DNA, 1353 bp, unclassified Ruminococcaceae
atggaaattaagaatcaatacttaaacagtgtatatgcaaacactgctaagcggaatcccaatgagccggaattcctgcagtctgtaaaagaagtcctgatgtctttagagccggtaattgagcaaaatccgaagctgattgaagcaggcattgttgaccgcatcgttgaacccgaaagagtcattcaattcagagtatcttgggtagatgacaacggaaaggttcaggtaaaccgtggtttccgcgttcagtttaactctgcaatcggtccttacaaaggcggtttgcgtttccatccgtccgtaaacctgagcattatgaaattcttaggttttgaacagatttataaaaactctttaaccggtctgccgatcggcggcggcaaaggcggcagcgactttgatcccaaaggcaaatccgacaatgaagtaatgcgtttctgccaaagctttatgaccgaattgtctaagcatatcggtgcagataccgatgttcctgccggcgatatcggcgtaggcggacgtgaaatcggatacttattcggtcaatacaagagattacgcaacgaatttaccggtgttttaacaggaaaaggtctgacctacggcggttccttggttcgcaccgaagcaaccggttacggtctgtgctactataccgaagaaatgctgaacgttatgaagaaggattccttcaagggtaaaacagttgttgtctcgggttccggaaacgttgccatttatgctacccagaaagcaacgcagctgggtgcaaaagtggttgctttatcagattcctgcggatatatttacgatgctgacggcattaaactcgatgttgtaaaacaaattaaagaagtggaacggggacgcatttccgaatacgcaaaacgggtaccgggttctgtttataccgaaggctgcagaggcatttggagcattccgtgcgatatcgctttgccttgcgcaacgcagaacgaactcaacggagaagaagctgcgatgttgatcaaaaatggcgttattgcagtggcagaaggcgctaatatgccatctactccggaggcagtcgatgcattccaggctgcaggcgtactgtttgggcctgcgaaagccgccaatgcaggcggtgtggctacttctgctttggaaatgagccagaactccatgcgttattcctggactgcagaagaagttgatgcgaagttgaaaaacatcatggtaaacatcttccacaattcttataatgcggctgagaaatacggttgcacaggtaatctggttgcaggcgctaatattgccggtttcatgaaagttgcagaatccatgctggcacaaggtgttgcatattaa

SEQ ID NO: 2400 - DNA, 1368 bp, unclassified Ruminococcaceae
tcggatgcgcttgccgccgttttaatggaaaacggagttgaaaagggagattccgtcggactgctttgtcgcagagggccacagatgataatcggaatgctgggcgtgttgaaggcgggtgcggcgtatgttccgatgttaccaaaattcccgatcgggagattgcaatatatggttgaaatcagtgggattacactgactctatgtgattccgaaacaatgcaatccttaccggaaggtttatcctgtcgttttatggatatcgacgtagctgtggaggaggaagcagtattcactccgccgcaaaacaggacaagcgatgatatttgttgtgttctgtttacctccgggtcgaccggaaaaccaaaaggggttatggttcgacaccgttcaatgtgcaacctaatggcagtgttatatccgacgctgtctgaagcagacggtggatatttgtgtgtgacgaatgttatttttgatgtttttgcaactgaaagcttaattgcaatggcatttggaaaatattccgttatggccgatgaggaagaaatggtgcttccttggaaggcggcggagttaattcacaagcatcaggtacggctaattcagtttactccttctcgtgcacagctgtttttagataatcaggcgttttgcgaggcaatatccggtatgccgataacaataacttgcggagaagtattgctgccgcagttgctgcaaaagctgcgtaatgtcggttgcagcaaaatattgaatttgtacggacctactgaagcaacggtatattcggcaatggatgatgtgacacatgcagcacgaattacggtaggaaaaatatatccgaattgtcgaggatatattttggatgaatcgatgcgtcctgtgatgccgaccgccatcggcgaattgtatttggcgggtgaatgtctggcggcaggatatatcggggaagaggaactgacaaaagctgcgtttttgccggatcccttctatcctggggaaacgatgtatcgaagcggagatatcgtgcggcaactccccgatggcagaattgattttatcgggcgcagagatcatcaggtgaaattgaatggacagcgaattgaattgggcgagattactcagaagatattggattacggctatgtgacgcaggcggctacgattctgaaaaaaaatgatcagtttatgcaactgtgttcttttgtagagccaccgaaagatacacatgttgatctatcagcgcttcgtgagtacttgaaaaaagaacttccaacttatatgattccgtctgaaatttatgaattgcagacaatgccttgtaccgcttccggtaaattagatttggcagcattgaagtcttatgat

SEQ ID NO: 2401 - DNA, 942 bp, unclassified Clostridiales
atgaacggaacggaaatgaaaaacgtaaaaaaacggacgtttttatcgatggtgaaacgtaacgtaaaactgttttttaaagacaaggcgatgtttttcacctcgctgataacgccgttgatcctgctggtgctgtacggcacgtttttatggaacgtgtacgaagattcgttccttgccggtgcggaacaattcggcgtgcaggtggatttaaagctggtgaaagggtgcgtcggcggcgaactgctctcctcattgcttgccgtatcgtgcattacggtggcgttttgcgcaaacatgctgatggtgcaggataaggtaaacggcgcggacagagattttaaaatgacgcccgtgaaaagcggcgtgctggcgatgtcctactataccgccacgctgatttccacgctgattatttcgtttacggcgctgggcgcggggctggcgttcattgcgttcaaaggatggtatttatccgccttggacgtgtttctgattgttctggacgtgattattttaacggcgttcggcacggcgctttcgtcgctggtggggtactttttaacgtcgcagggacagatttcggccgtgggcaccattgtcagttcggcatacgggtttatctgcggggcgtatatgccgatttcgcagttccccgcgtggctgcagaaaacgattatgtttctgccgggaacgtacggcacttcgctgctcagaaatcactgcatgggcggggcgttccgcgaaatgagtaagattttccccgcgcagtacgtggaaaacaacaaaaagagcgtggactgcattttatatttcttcaatcatcgggtaggcacgggcgagatgtatgcggtgcttcttggcgctgtggcgctgattatcgcggcgtattgcgttgttgtgaaagtaaaatcgcggaaaaaaagtgcgactgcggcttga

SEQ ID NO: 2402 - DNA, 1395 bp, unclassified Clostridiales
atggacagaatcgaactgaaaaaaatcgccgcggacgtagcggcgtacgccggcaaaacggttggcgttgccggctggatcaagacggtgcgcgattccaaggcgttcggatttatcgaactttccgacggcagctgctttaaaaacacgcagatcgtgtttgaacgcgccacgctggaaaattacgacgagatagcgcatcagaacgtgggcgcggcgattttcgttacgggcgaagtggtagctacgcccgaaaataagcagccttacgaaatcaaggcgaaaaaaatcgttgcggagggggaatcttcgcccgattatccgctgcagaaaaagcgccattccgtggaatttttacgggaaatcgcgcatctccgcccgcggacgaatctcttttcggcggtgtttaaaatccgcagcgaagcggcgttcgccattcataagttttttaacgagcgcgggtttgtgtacgtgcatacgcccattatcacgggcagcgactgcgaaggcgcgggcgcgatgtttcaggtaaccacgctgcccctcgaagagctggcaaagagcggcaaggcgcccgattataagcaggatttcttcgggaaaaaagcttcgcttaccgtttcggggcagctgaacgcggaaacgtacgcaatggctttttccaacgtgtacacgttcggaccgacgttccgcgcggaacattccaacacggcgcggcatgcggcggaattctggatgatagagccggaaatggcgttctgcgaccttgcgggggatatggacgtggcggaagcgatggtgaaatacattatttcgtacgtcggagagacctgcaaagacgagctggattttttgaataaatttgtggatacggggcttctggaacggctgaaaaacgttacggaaaacgatttcgtgcggttgccgtacaccgaggcgattgagattttaaaagagcacgcaaacgaattcgacgacaagaatattttctggggcaaagatttgcagagcgagcacgagcggtatcttacggaaaccgtgtttaaaaagccggtgttcctgaccgattatcccaaggaaatcaaggcgttttacatgaagcagaacgacgacggcaagacggtggcggcggcggatttgctggtgcccggcatcggggaactgatcggcggttcgcagcgcgaggaaaactacgaaaagttatacaaccgcattgtggaactgggcatgaaacccgaagattattcatggtatctcgatttgagaaagtacggcagcgttacgcacagcggctacggcttaggcttcgaacgcatgattatgtatctgacgggcgttacgaatatccgcgacgttattccgttcccccgtactgtatctaacttgttgttttaa

SEQ ID NO: 2403 - DNA, 1896 bp, unclassified Clostridiales
atgagtgaaaacgaacaagtgaaaaacgaaaaacagggaaaaatccgtatttccagcgaaaatatgatgcctattatcaaaaagtggctgtattccgataaggatatattccttcgcgaaattgttgcgaacggcgtggatgcgattacgaaatacaagaaacttgtggaaatgggcgaagtaaagcccgcagacgattccgcggaagagtacagaatcgacgtacgaaccgacgaagcggcgaaaacgctgaccatcgaagataacggcatcggcatgacggaagaagaagttgaaaagtacatcacgcagattgctttttccggcgcggaagatttcctgcagaaatacgaaaaggcttccggcgacggaatcatcgggcatttcggactcggattctattcggcgtacatggtggcaagcgacgtggaaattttcacgaagagctacaagggaacgcccgcggttcactgggaatcggacggcaacgctacttataaaatcggcgaggcggaagaacgcggcagaggtacgaaaatcgtgctgcatatcgccgacgaagaaaaagaattcctgaacgaatatacgattcgttcgttgctcagaaagtattgctcgtttatgccgtatcccgtatacctgaacgcaaagggcgtcaaagagggcgaaaaggacgagaaaggcaacgagaaacaggcggacaagcccgtaaacaacacgcagcctttgtatctgaaagacccgaaagagtgcacggacgaagaatacaaggcgttttaccgcgatacgttctccgattacaacgaacccttgttctggattcatctgaacatggattatccgttccgtctgaaagggattctgtacttcccgaaagtaaaagaacaggtacagcttgaaaaagggcaggtgaaactgtactgcaatcaggtattcattgcggacaatatcaaggaagtcattccggaatttctgatgcttttaaacggcgtgatcgattgcccggatatccctctgaacgtttcccgcagctttttgcagaacgacagacaggtacagaaaatcgcgaaacacattacgaagaaggtggcggataagctgacggcgcttttcaaagacgacagagaaagatacgaaaattgctggaaagacatcgcgacgttcattaaattcggctgtctgaaagacgaagatttttacgagaaagtaaaagatatcgttattttcaaaaatctcgaagggaaatacgtgcccgtaaccgatttcttcggcgaggaaatttcggacgaggatgcggaaaagggtaagcaggcaaaggcgatttattacgtatctgacgaaacgcagcaggcgcaatatatccgtctgttcaaggacgccggtctggacgcgattgtttgcgacacttacatcgacccgcatttcatcagctttatcgaatacaagaatccgagaaagtgccgctttgtgcgcatcgacgcggacgtagacgccgcgctgaaagcggaaggcgaagtgaagcaggacgattacaaagatttaatcgaactggtgaaaaagcaccttgtaaacaaagacattgcggtgaaagcggataagctgaaaaacgccgacgtgcccgcggtggttaatgtggaagaatttatgcggcgtatgtccgaaatgaacaaattctacggaatgacggaagcggacgcgatgaagaacgcgacgctggttctgaacgtggcgaacgacaccgtttcgaaactgacaggtttatccgaggaaaagcaggaatttatcgtaaatcagatttattatcttgccatgctttcgtataaaaagctgtcgcccgacgaacttgctgactttatgaaacgcagcgaaacgttgctggcggattacgcaaaataa

SEQ ID NO: 2404 - DNA, 1290 bp, unclassified Clostridiales
atgatcgacatcaatctcatcaggacgaatcccgataaagtgcgggaaaatatccgcaaaaagtttcaggataagaaattaccgctggtggacgaggtgctttcgctggacgcgaaacgccgcgcgttaatcgccgagggggattccctccgcgccgcgcgcaattccctttccaagcaggtgggcgtgctgatgaaagaaggcaaaaaagacgaagcggaaaaggtgaaagcgcaggtaaccgccgacgccgcacgccttgcggagatagaaaaggaaaacgaggaaacggacgaggcgctgaaaaaagcgatgatggcgattccgaatatcatcgccgacgacgtgcctatcggcaaagacgattctgagaacgtggaactcaaacggttcggcgagcccgtcgtgcccgatttcgaagtgccgtatcatctggatattctggaaagactggacggcatcgacgtggattccgcgcgccgcacttccgggcagggcttttattatcttacgggcgatattgcccgtctgcattccgccgtgcttacctatgcccgcgatttcatgatagataagggcttcacgtacgtgattccgccgtatatgattcacggcgacgtggtttcgggcgtgatgagcttcgacgaaatggacaatatgatgtacaagatcgaaggcgaggacctgtatcttatcggcacttccgaacattcgatgatcggcagattcatggggcagatcatcgacggcgcgaagctgccgttgacgctgacgagctattcgccctgcttccgtaaagaaaagggcgcgcacggcatcgaggaacgcggcatttatcgtattcaccagtttgaaaagcaggaaatgattgtggtgtgccgccccgaagaaagcgacgcgtggtacgaaaaactctggcagtatacggtggaattgttccgttcgatggaaattcccgtacgccagctgggttgctgttcgggagatcttgccgatctgaaatacaagagctgcgacgtggaagcgtggtcgcccagacagaagaaatatttcgaagtgggttcgtgttcgaacctgacggacgcgcaggcgcgcagactttccatccgctataaggatacggacggcaaaacgaaactggcgcacaccctgaacaacacggtggtggcgccgccgagaatgctgattgcgtttgtggaaaaccatctgcaggcggacggcagcgttacgattcccgaagtgttgcagccgtatatgggcggaaagaaagtaattcttcccacgaaataa

SEQ ID NO: 2405 - DNA, 3441 bp, unclassified Clostridiales
ttgaaacagggatttttcaatgccgccaaaatcggcggcgattacgagagatttacggaagaagtccgtcgcggtacgcccgcggcggctttcggcgtttcttcggcggtgaaatatctgctggcttccgtcatcggcttgcccgttttatacgttacggcggacgccgtttccgcgcgcgcggcggcggaaaatatttccgttttgtccggggagaaagccgcggtgattacggcgaaagacgaggtgctttcttaccgcaaagcgctttcgaaagacgcgatgttccggcggatcgagggcgaatacgcgctgatgaacggctgccgcgttgtggcggcggagattgacgcgctgttgcagccgttcccgaaaaaactgcccgttctggtgctggaagagggaaaagaggcggatttttcggcgttgactttgaggcttgcgaatatgggttacgcgcgcgtttccgaggtggaaagcaagggggcgtacgcgctgcgcggcgatattttagacatttttcccgtgggcgaagagaaccctgtgcgcgtggacttcttcggcgacgaagtggaaaaaatcaagccgtacgatatggaaacgggcaatcggctggagccgaaaacccgtcttgcgattctgcccgccgccgattgctttatcgcaaaggacgaaatcgcgggcgtgaaagaggtgctgcgggagagtctggcggagtttacgacgcgcgagagttacgtgcgggcgaatacgattgtttccgaactgctttcggggctggaacaggcggaagaggacgggaaaacgcgcggatgcgaagctctttccgccgaggaatttttgttgccgctgcttggaaacagcgggacgatattcgatttgctgccctgcaacgcggtgatcgtgtttgacgaaagcaagacgctgcgggataagtgcgaggcgatttacaaggagttcgaagagaggtattccagactgaaagcgggcggggaagttttaagcttttcgcacgggcagctgacggaaaagcaggcgttttacgacgggctgaaaaaattccggctcgcggcggtgcagacgtttacggggaatccgtttttctttacgccgctgaaaattttcaatttccgcgtaacgcccgtcagccggtatctgaacgcggcgccgcagctgatcaccgaccttaaaaactggctgaaaggcgggtatcgcgcggtactgttctgcgggaacgaaaaccgtctggcgaaaatgagcgaaacgctttcggacgcgtacgtgcccacggagccgaccgccgatttcgacgcgctgcacgcggtggggctgacgagcgaggcgctggataaaggctttattctgcacgaggcgaagtttgtggcgataggcacgggcgatttgtacacgaagcccgtggagcagaagcgggtgaagcgccgccgcggcgatttgtttacggcgcccgaagtgggcgactacgcggtgcacgaaacacacggcgtggggcgcgtgatcggtacgaaaaagatagaaacgaccgacggcacgaaagaatacgtcgcgctcgaatacaaggacggcgacacgctgtacgtgcccgtggagaatatggactcgctttcgaaatacgtcggcggggatcatccgccgctgagcaagataggcggagcggaattcgaacgggtgaaggcgcgcgtgaaagcctccataaagaaaatggcgttcgatttgaaagcgctgtatgcggcgcgcgcggaaaaccacgggtatgcgtttcccgaaaatcaggcgttcatgagcgaattcgaagaggcgtttccctacgagctgacgcccgaccaggcggacagcgtggcggaaatcaaggcggatatgtgcagcggaaaggtgatggaccgtctgctgtgcggcgacgtgggtttcggaaaaaccgaagtggcgttccgcgcggcgtatctttgtatactgggcggcaaacaggcggcgctgatgtgccccggcacggtgctttgcaatcagcattacgataccgcgctgaaacgcttcgaaccgttcggggtgaagattgccgtactcaaccgtttcgctacgccgaaagaaacgaaagccacgctggaagggctggcggacggttccatagacttcgtgataggcacgcacaggctgttgtcggcggacgtgaaattcaaagacctggggctgctgattctggacgaggaacagcgattcggcgtggaacacaaggaaaaaataaaacatctgcgcaacaatatcgactgcctgacgatgacggcgacgcccattccgagaacattgcatatgtctttgaccggaatacgggacatttcgacgatacgcacggcgccgcgcgagcgacttccggtgcagacgtatgtggcggaagagacggaaacgctgatccgcgacgcgtgcatcagggaattatcgcgggacgggcaggtgtttattttgtacaaccgcgtggaaagcatttatacgtttgcggcgaaagtggcggcgatcgtgcccgaagcgagaatttcggtggcgcacgggagaatggacaagaccgtgctggaaaacaacgtgtacgatttttattccggcaaaagcaacgtgcttgttaccaccacgattatcgaaaacggcatcgacctgccgaatgcgaacacgctgatcgtcatcgattccgaacggctgggcatttcgcagctgtatcagctgcggggaagagtggggcgcggctcgcgccttgcgcacgcgtactttacatataaggcggagcgggtgatgacggagaacgccgccgagcgactgaaagccattatgcagtttaccgagctgggcagcggctacaagctggcgatgcgggatctggaaatccgcggcgcgggaaacgtgctgggcgcggaacagcacgggcatatggataaagtgggctacgaactgtacgcgaaacttttaaaagaggaactgacgggcgaaacggaagaggaagtggagctggacgtgcgcacggacgcgtatattcccgaaaaatacgtggaatcttcggcgggcaggctggatacgtacaagcagattgcggagatacgttcggttgccgattacaagcgcgtttattcttcgttgaaagaagtatacggcgacccgcccgcggcggtggtgaaccttctggtgattgcggcgatgaaggcgtacgcttcgcggctgggcgtgaaaaaaatctgcgcggcgaaaaaattcggttcgctggaattttccggcatggaaaagctgggcgcgaaaggagtgcaggcggcgatggaaaaatacgcggggagaatcaggctgaacatgtcggtggcgcccgtgatagaattcgcgattgcggggcagcccgtggaagtgatggcggagatgacgaaatttctgaaatttgctttgcagggcggctga

SEQ ID NO: 2406 - DNA, 2475 bp, unclassified Clostridiales
atgccggatgaaattatcgtgcgcggcgcgcgcgtgcacaatctgaaaaatatcgacgtgaatattccgctgggaaaatttgtcgctgtggcgggcgtttcgggaagcggaaaatcgtctttggcgctcggcgttttgtatgcggagggttcgaggcggtacctcgaagcgctttcggcgtatacgcgcagaaggctttcgcaggcggagaacgcgaatggggattcgatagaaaacgtacccgccgcgctggctttgcatcagcgccccgcggtgcccaacgtcagaagcactttcggaacgctgacggagctttcgaacagtctgcggctgatgtattcaaggctggggagtcatctctgcccgaacggacatttcgtgccgccgacgatgaacgttgccgccggaaaggcgcttgtctgccccgtatgcggggcgattttcaatccgcccgcggcggaagatttttctttcaattccacgggcgcctgtccgacgtgttcgggcacggggatcgtgcggaaggtgaatatcgacgcgctggtgccggacgactcgcttacgatagacgagggtgccgtggctccgtggaattcgttgatgtggtctttgatgacggacgtctgccgcgagatgggcgtgcggacggacgtgccgttcagggagctgacggaaaaagaaaaagaaatcgtgtttcacggaccggcggagaaaaaacatattttttatcatgcgaaaaattcgaatcaggcgggggaactggattttacgtatttcaacgccgtttataccgtggaaaacgcgttggcgaaagtgaaagacgaaacgggaatgaagcgcgtggcgaagtttctctcggaaacgacctgcccggactgcggaggcacgaggctgaataaaatcgcgcgaagctccgtaatcgacgggaaaacgctgccggaagcgcttgccatgccgctcggcgaactgattgcgtgggtaaagacggtgccggaaaaaatgcccgacgaaatgcagccgatggcggagagcatcgtaaaggaatttttgtccgtatccgaacggctgatcgatctcggactggattatctgacgccggacagagctgcgaacactctttcgacgggagagttgcagcggattcagctggcgcgggcggtgagaaataaaacgaccggcgttctgtacgtgctggacgagccgtcgatagggctgcatcccgccaacgtggacgggctgcttgccgtgatacgcgaccttgtgaagcgcggcaattccgtggcggttgtcgaccacgatacgcgggggataagcgccgccgattacgtgattgaaatgggtgcgggcgcgggaaaatcgggcggaaacgtactggcgtgcgggagcgtttcagaggtggaaaacaatgagcgttcggtgatcggcggctacctttccgggaaaaagaacgtgaacgtacgcgtacgcgccgcgaaagacgaaatgtttgataaaggcgtcatcgaactggctacggggccgttgcataccgtgcgcgcgctggacgtgaaaattccgaaagggcggctgagcgtggttacgggcgtttccggaagcggtaaaaccacgacggtgctggaaagtcttgtgcccgcgttacaggcaaaaatcaacggtgaaaaaatgccttcgcatattaagttcctttccgcggaaggcatccgccgcgtgaacctgatagacgcgacgccgataggcatcaacgtgcgctctaccgtggcgacgtattcgggaattctggacgatttaagaaagcttttcgccggcacggcggaagcgaaagcgcacggctggaaagttaacgatttttcgtacaatacgggaagcctgcgttgcccaacctgcgacggaacgggcgaaatttcgatggatattcagtttttgccggacgtggaaatcatctgccccgattgcggaggcaggagatacgcaaagcgggcggacgaagcgaaaacggaattgtgcggcagaacgtatacgatttcggagctgatgaacgttaccgcgggagaagccgtgcggttgtttgaaaagcataagaaaatccgcgaaaaagcggaaacgctgacggaactggggctcggatatctgacgctcggcgaaagcacgcccgcgctttcgggcggggaagcgcagcggctgaaactggcgacggagctgaagcggacgcaggacgacgcggttttcgtattcgacgaaccgacgataggattgcacccgcaggacgtgggcgtgcttctgaaagtgtttgacgggctgattcaaaacggcgcgacggtggtggtgatagaacacgacctcgatatgattaaaaacgcggattatatcatcgatatgggaccgcgcggaggaagcgcgggcggcagaatcgtggcggagggaacgcccgaagaaatcgccgaaaacccggaaagcgttacgggaaaatacctgtaa

SEQ ID NO: 2407 - DNA, 1131 bp, unclassified Clostridiales
atggttaaaaaaacaacgaaaaaatttttattaagtctgttatgcgtctttctcgcgctgctcaccgtcgtcatcggctacgcggcgtacgtgctcctttcctattatcggctggaagattatatcgctcttcccgtgtcggcggcgcgggcggacgccgaggaaagcggaaaagcggacgttccctgccgcgttacggcgctgaaaacggaaacctcctacacggcaaccacgttcaatatcgggttcggcgcgtatacgcccgatttcacgttttttatggacggcggcaagcaatcgcgcgcggcaagcaaagaaagcgtggaaacgcacgtaaactccgctttgaataccatcaaagaattcaaccccgatttcgcgctgtttcaggaagtggatacttcctccacgcgcagttaccacgttaacgaaaaagaaacggcgcaaaacgctttttcggaatacgcaagcgtttttgccgtcaattatcattcggcatatctgatgtatccgcttcacgaaccgcacggaaagtctaacagcggcattcttacgttctcgaaaaacggcttttcgtcggcgctccgccgttctttgccgattgcggacgatatgaaaaaactgctcgatctcgaccgctgctattcggtatcgcgcatccccacggaaaacggaaaagaatttcttttgtataacgtgcacacgtccgcctacggcggatcggacgaaatccgcgcggcgcagatgaccatgctgttttccgacatgcaggcggaatacgcaaacggaaactactgcgtggcgggcggagatttcaatcacgatttcacgggaacgtccatcaaagatatcaacggcgaagagggagaaacggcgttcggctgggcgcagcccttccccgcggaactgcttcccgcaaacgtgcaccgcgccaccgattacaccaacaaacggcaactgcccacctgccgcaactgcgacgtgccctacaaagaaggcaattacactttaatcgtagacggctttttatttacgtccaacgtgcgcgtggagtatatcgaaaacgtacagaaagactttgccgattccgatcacaaccccgtcgtcatgaaattttctctgattgcataa

SEQ ID NO: 2408 - DNA, 1509 bp, unclassified Clostridiales
atgattatggattcttcggtagaaacaaaacgtcgggcggcaaaaaacgcggatatgacggagggcggcattttcggaaaattcgttgcgtacgcgcttccgttcatgctcacaaatctgttgcaggtcttgtataacgcggcggatatcgtcgtcgtggggctttcgcacgaagccgacgcggtaggcgccgtaggtaccactacggcgttcgtcaacctcatcacggggcttttcatcggctgttcgttgggcgccgaagtggtgatttcccgcgccgtcggcagaaaagacggtgccgaaacggaaaacgccgtacataccgcgcttcttttcggcgtgattttcggcgcgttctgcggtgcgctcggcttttttctcgcaaaacccgtgcttgctctgatgggcaacgaagcaaagcttcttgaactggcttccgtctacacacgcatctattttctcggacttcccgtcatcgcgctcacgaatttcgccgtggcggtgctgcacgcggaaggagattctaaaacgccgttcgtcgtgcttacgctttcgggcgtcgtcaacgttattttaaatctcgtgcttgtgcttgtcgccgatctgtccgtcgagggggtggcaatcgccacggtcgtcgccaacgtcgtatccgcgatattattgatcgcgcggctgctgaaagataaaaccgcatgtcgcttacgccttaaaaaactgcgtatccacatgaaaacgctcggaagaatcgtggaagtggggtttcccgccgccgtgcaaagctcgctgttctcgctttcgaatatgctcattcaatcatctatcgtcaaagtgaataacgccgtggcgggggcggaagcggcatatcagcccgtcgttaaaggcaattcggcgtgctccagcgtggaaggcttcatttataccgtcatcgattccgtcggtaaagcttccgtgtctttcgtggggcagaatgccggcgcgaaaaagtacgacagactatcggaatttttaaaaatcgcctatctcacgtcgtttgtcgtcggcgtaatttctcccgcaatcgttctgcttttaagaaatccgctgctcgcgctttacggtatcagaccggctgcggaaggactggataaaatcgcatacgacaccgccgttacgcgcatgctcattatgttcgtgccgtatttcaccatcgcttttatgcagctcggttcgggcgttctgcaagggctgggcaaggcggtttccgcgtccgtttcgtcgcttatcggcgcctgtcttttccgcgtgatatggattttcacggtattcgcggcaaaaccgacgattgaaatcatctacctgtcttatcctatttcgtgggtgcttgtcgcgctgtcgcattttatcatgatccgtaaaacactgaaaaaactccgcgcttcggcaagcgaaacggcagaagagggaaaagcggcaaacgaaaacgcggaaaccgccgcagaagcagcgatttctgttgacaaaaaataa

SEQ ID NO: 2409 - DNA, 2280 bp, unclassified Clostridiales
gtgtttttgcaaaaaaaacgctttgcgtgcatcggtgatcggtttttcgcggagtgtatttttttcggtaacgacggggaagaaaaaagggaggacgaaaagtctatgaagattattaaaagaaacggacaggaagttgtattcgacagagataaaatcgttcatgcggtatgccgcgcgaacgaggagatggacgattttgcgaaaatttcgaacgacaaaatcgtaagacttgccgccgacgtggaaaaagagtgcaatcacatggggcgctccgtttccgtggaagaaattcaggatatggtggaggaccgtctgatggcgatgaacgctttctcgcttgcgaggaagtacataacgtaccgttattcccgcgcgctggcgagaaaggcgaacacgacggacgcgcatattcttacgctgatcgaatgcaacaacgaagaagtgaaacaggaaaattcgaataaaaaccccacggtgaacagcgtgcagcgcgattatatggcgggcgaagtttccaaggatctgacgcgccgtattctgctgcccgaagatatcgtggcggcgcacgacgaggggattattcatttccacgacgcggattattttgcgcagcacatgcacaactgcgacctcgtgaatctggaagatatgcttcaaaacggcaccgtgatttccggtacgctgatcgaaaagccgcacagcttttctacggcgtgcaacatcgccacgcagattatcgcgcaggtggcttccaaccagtacggcgggcagagcatttcgctgacgcatcttgcgccgttcgtggatatcagccgtaaaaaaatccgcaaagaagtggcggacgaactggcgctggtggatatcacggacgaggcgcacattgctcagattgccgaaaaacgccttcgcgacgaggtgcgaaaaggtattcagatgatacagtatcaggtggttactctgcttaccaccaacgggcaggcgccgttcgttacggtgttcatgtacctgaacgaggcgcgcagcgagcaggagaaagcggaccttgccgtgattatcgaagaaacgctgacgcagcggattcagggcgtgaaaaacgaatcgggcgtgtggattacgcctgctttcccgaagctgatttacgtgctggaacccgataatatcacgaaagattcgaaatattggtatctgaccgagctggcggcgaaatgtacggcgaagagaatggtgcccgattatatttccgaaaagaagatgctggaatacaaggtggacaagaacggcgaagggcattgctatacctgtatgggctgccgcagctttctgacgccgtatgtggacgagaacggaaaaccgaagtattacggcagattcaatcagggcgtcgttaccatcaatctggtggacgtggcgctttcttccggcaaggacgagaagaaattctggcaaattttcgacgaacggctggacctttgctaccgcgctctgatgtgcaggcataaccgcctgaaaggcacggtatcggacgcggcgccgattttgtggcagtacggcgcgctggcgcggctgaaaaaaggcgaaacgatagacaaactgctgtacggcggctattccacgatttcgctggggtatgcggggctgtacgaatgcacaaagtatatgacgggtaaatcgcatacggacgaagaggcgaagccgttcgcgcttgccgtgatgcagcacatgaacgacaagtgcaaggagtggaaagcgaaggaaaacatcgatttttcgctgtacggaactccgctggaaagcactacttataaattcgcgaagtgtttgcagaagcggttcggcgtgatagagggcgttaccgataaaaactatatcacgaattcgtatcacgtgcacgtaagcgagaagatagacgcgtttaccaaactgaaattcgaaagcgaatttcagcagctttctcccggcggcgccatcagctatgtggaagtgccgaacatgcaggataacattcccgcagtgctttccgtgatgcagtttatttacgaaaatatcatgtatgcggagctgaatacgaagagcgattattgccaggtgtgcgggtacgacggagaaattcagattgtaacggacgaatcgggtaagctggtgtgggagtgtccgtgctgcaaaaaccgggatcaatcgaagatgaacgtggcgagaagaacttgcgggtatatcggcacgcagtactggaatcaggggcgtacgcaggaaatcaaagacagagtgctgcatctttga

SEQ ID NO: 2410 - DNA, 1905 bp, unclassified Clostridiales
atgcccggaaccaaagcagaaaataaagcggattttcctttacacttatttcatcacggcgtaaattataaagcttacgagtttttcggggcgcacgaagccacccgccgcagaaagaaaggatttgtgttccgcgtgtgggcgccgcgggcgaaaagcgtatcgctcgtaggcgaattcaatcgctgggatcccgcggcacatgtaatgtcccgcctgatagacggagagacgtttgaaattttcgtagaggggattacccgctacgcggcttataaatattgcatcgaaacgcaggacggaaggctgctttacaaggcggatccgtatgcgtttcatacggaaacgcccggcgggaattcgtcgaacgcttcgaaagtttatccgctcgacggctttgcctgggaggataaggaatatttcaaaaagcttgcccgtacgaatatttattcttcgccgatcaatatctacgaagtgaatcttctttcgtggaagcgccgcgaggacggttcgtttcttacgtacggagagctggaaaaatcgctggttccgtatgtaaaaagaatggggtacacgcatgtggaattcatgcctgtttccgaatttccttacgagggttcgtgggggtatcaggttacggggtattatgccgttacttcaaggctgggcacgccgcacgatttcatggctcttgtcgacgcgtttcaccgcgagggaatcggcgtgattctggactgggttcccgcgcattttcccaaagacgctttcggactttacgaattcgacggagcgccgttgtacgagccgtcgcaggaggacagaagagagcatgcgggctggggaacgagaacgtttgattacggcagaaacgaagtgctttcgtttctggtttcgaacgcggtgttttattttgagaaataccatgtggacgggctgcgggtagacgccgtggcttcgatgctgtatctcgattacgataaaaaacccggcgaatggactccgaatatttacggcgacaataaaaatctcgaagcggtgtctttcttgagaaagctgaacgaaacggtgttcggctatttcccgtatgcgatgatgattgccgaagaatccacggcgtggccgctggtaacgcgccctacggcggttggcggcttaggctttaatttcaaatggaacatgggctggatgaacgacgtgatggcgtatatttctaccgacccgctgtttcgaaagtacgagcacaacaagctgacgttttcgatgatgtatgcgttttcggaaaattacgttctgcccgtttctcacgacgaggttgtgcacggaaagtgttcgctgatcgggaaaatgcccggagaatacgagcagaagtttgcgggaatgcgtgcgtttttcggatacatgatgtcgcaccccggaaagaagctgaactttatgggttcggaattcgggcagtttaaggagtgggattacgccgaaggcgtggaatttttcctaaaagattatccgatgcacgcgcgtctttcgaaatgtgtgcgggatctgaacgaattttaccgtaatacgcccgcatttttcgaaatcgaagattcgtgggacggattcgaatggatttccgcagacgacgccgatcataactttctcgcgtatatccgccgcgataaaaaaggcggggaaacggtggtgctggtgaatttttccggcgcggaactgaaaaattaccgcgtgggaatttcaggcaaaaaatatcgtaccgttttcgataccgattcgaaactgtacggcggaagcggaaaggtgcagaagcgcgtttatcacgcggaaaaagtttcggcgaacaataaggaaacgtcgattgcggtggatatgccgccgctttcctgcaagtatctcgcgcgctgcgaataa

SEQ ID NO: 2411 - DNA, 2337 bp, unclassified Clostridiales
atgaacaagaagttaaaacggctgaatatttttctggcgggcgcggcgtgctgcgcttcgctcggtttcgggcttgctaccgcgggcgcgtttacggcgtcggcggcaacgtatgcgccgtcttcgatttttacgagaagcggcggcgtaacggtaacggcggataagacggacgcgaaaaagcttgcgtttacctttacgaacgcggacgataaagtggcttacaaccgcgatatggcgtggaaatggttcgaagcggacgaaacggacgcgacgaagggcgttgcgaagtatctgacggcggtattttcgctggaagataccaactacaaatcgtttaccgtaacgctggaaacggcttctttaaccgctacggaaaagaacaaggtaacgaatacgattgtgttcacgcgttcgggcgacgcgatttttgcgaatctgaacggcgcggacggcggagaaatcgcggtgtgcacgggcacgacggacattgcgctgacgataaccgacgagggcacgacggacgcgggcgatttcaaagtgctggcgaacggcatcgaaatcggaacaatgaagaacatcggttcgaattacgcgggatatgtgagcggcgacgacggaagagtgccgctggcgtttacggcggaactgaacgagggcgcggaagagaccgtctgcatttttaaatcgctgaacggacagtcgtttgaactgaacgacgataaggaaatcgaagatacggcgacgcccgtactggtaatcgacgatgatacgtacgtgcctgcgatgggcgaagcgttcagtctggaaacgaaaacgatagacgtgctggacagaagttcttcggtgaagagcacggcggaatattatcagtggacgcccgtaagcgtttccgcggaatacaaatcgctggacaacgtgaaaattctggaattgccgtacaagaaggacgacggtacgacggcgacggtgtacgacgaggaaggttgtgaatatatttcggtaaaatatacgcttgccgattccacgcacacgaagggcgccgaggacgagaataagaaagcggctacggcgtatgctgcctggtatctgaaagacgtgcagacgaagctgctgaaggacgaagcgaatacacagctttcgctggttgccgtgaaggccgacgaggtagcgcccgtatatgcgggcggaaagctttcggacacggaaaacaatttcgcgaaagaatatcagaagagcatagacgcaaagacggaggatctggaagcgggcagcggcgaatcgttctatctgccttcgcccgaaaaattattcgaggataattccaccggctacaagtcgatgaaatatacgctttgctacaagttaccgaagagtacttccgcatcgaacacttcgaacgtttcgatcagcagtctgaaactttcgctggataaacccggcgtgtacgaattcaagctgtttgccaccgatcgtgcgggaaacgttacgaaatcggtgaaagacggggaaacggaagcggaagaaattacaaccgagaatatttgggagcatgacgaactgcctacgttctcgtttacgattacgaagcagaagaaaatttatatcgacgacggcgcgaaaagttcgcgttcggatacggggctgatcggcgtgaaatattcggacgtatcgtttacggtgaaaggcggaacggcagcgaacagcgaatacggcttgtattatttcgaccttgcgtatttcaacgagctgttttccgggaagttcagactgagcgcgagcgatctgacgtcgctgacgtcggtggacatttcgggcgcggcaaccgtcgaacaggcggcggaaaaatatgcagccgcgttggcgcggaagctggattccacaggtaacgaactgaaagcggagaattttacgaaagcttccgcggacgggaaagtggtattgcgcaaaatagaggaataccgcgacaaggtgagcgaagagaacgctccttccaacaagtacgaatggaacgcgagctcgaaatcgtttaagcctgtggaaagaggcaactatattgtgttcggcgtgtttaaagatactacgccgggcggcggatatgccgtaggatacaagtcgatcgcggtaaccgataaggaagatattaaccccggcgaatcggagtggctgaaaaagaatcttgtttccgtgattctgttctcgatagcgggcgtgatgctgattttgattatcgtgctgctgtttgtgaagccttccgacgaaacgcttgaggacgtgggagaggaaaagacggcaaaatcgaaaaaaacttcgaaaaaagagaaaaaagccgaataa

SEQ ID NO: 2412 - DNA, 1332 bp, unclassified Clostridiales
atgcagggaaaatactttatcgtaacgtacggttgtcagatgaacgtacacgaatccgaaaaaatagcggggcttctccgcacggcaggctacgaatccgcaaattcgctggaagatgcagacgttatcgttttcaatacctgctgcatccgcgaaaacgccgaaaatcatgctttcggcaacatcggcgcgttgaaaaagctgaaaaaacagaaaaaagatttaatcatagccgtcggcggctgcatgacgcaggaaaaaggcaaaaccgacgttctgaaagaaaaatttccgtttatcgacgtcattttcggcacgctcaatctggaagaattgcccgtattgatcgaagaaaaacgccgcgcgaaaaagcgcgttgtaaaaatacgcgaaaaagagggcgaaatcgtagaaacggttacgccgttccgcaccagctttcccaacgcatgggtaaatatcgcgtacggttgcaacaatttctgctcgtactgcatcgtgccttacgtccgcggcagagagcgttcgagaaaagcggaaaacattttagccgaagtcgaatcgctcgtaaagcaggggtataaagaaatcacgctgctcggtcagaacgtcaattcttacggcaacgatctgtcggacggttcgaatttttccgatcttctcgataaggccgcgtccgtcgaaggcaaattccgccttcgtttcatgacgaatcaccccaaagatttcaccgaggacgtcgtgcgggttatgaagaaacacgagggcaaaatctgccgcctcgtgcatctgcccgttcagtccggttccaacgaaattttaaaacagatgaaccgccgctacaccgccgaaaaatatctcggcgaagtcagaatgttaaaaacgctgattcccgaagcggaagttaccaccgatatcattgtcggttttccgggcgaaacggaagaagactatcttcagacggaagcgcttgtaaaagaagcggatttcgcttcggcgttcacgttcgtatattccaggcgcagcggcacgaaagccgcggaaatggaaaatcagattcctgaagaggtttcgaagaatcgcattatgcgccttgtggaactcgtcaattccaaaacacgcgaaaaatcggaaaaatacgtcggcaaaacggtggaaattctctgcgaagattacgacgaaaagaaaaagacgtatctcggcagagacgaattcggcagaatggcatattttccctatccgcacaatcttatcggcaaatttgtatccgtgcacgtaaattccgccaacggcatttcgctcacgggcgacgtcgttgccgtcgaagattga

SEQ ID NO: 2413 - DNA, 1389 bp, unclassified Clostridiales
atgctttgtattccgctcacgcgctgcgtgtgcggtttttttcattattttatatacctcacgcgggcggcgcgtaaacgcagaatcctgcttcgccgggggcttcccgcaatttttcgtgccggacggaaaggagaatcttttatgtttcaatcattgcttgcttgctattccgagaagctgaaaaacgatgaaggcaaaacaatcggctacgtttacgaagagctgtggacgaaatacgcctccaacctgctcggaaaagtattcatgtacgcggcgctgttcctcatcgcggcgctcgttatcgtcggcatcgttacccgtctgaaaaaagcggaaaacttttcgtcgtacttaaaaatcgcggctgccatcggcgtttctttcgcgctcaccgttatcttaacgatgcttgccgtcggcttcggcaaaatcggcgaaaaaggctatatgcaggaaaagccgatgctgcttgtgctgatcccccccatggttcttgcgggaatcgcgattctcggcggcatcgcgtcgtatatctcttatctctattcgaaaaaggcgggcaaaacggtattgtacgttacgttcgcgctgtttgccgcggcgcttatcgccacgtttgtttgccttatcgtttacttcaataaaaacatttcgaacgacggctattacgatacggcggacggctcgtacggcaaagtgaatcagcttgttctgtatctcgcttccgcgcttcttatcgccgtcgcgctgattgcggcgttcctttgcgataaaaaaggcagtttcacgttcgattcgaagagcatcgcccttgcgggtatctgcgtttcgttatcgttcgcgctttcgtatatcaaactctgggatttgccgcagggcggcagcgtaacgctggtttcgcttcttcccgtcatgcttttctcgtatatctacggcgcaaagaaaggcttgttcgtctgcttcgtatacggcgttctgcaatctttgcaggatccgtacatcattcaccccgcgcagttccttctggattaccccgtcgcgttttcgatggcgggacttgcgggcgttctgaaaaacgtaaacatcaaatcgcagcagcttaaattctcgctgtccgcgctcatcggcggcacgatgcgttacgtatcgcacgtgttttccggggcgtttgcattcggcgcgtacgcgctcgacgccggcgctgccaacgtatacacgtacagccttgcttacaattcgtttgtgtttgtagatattcttctcgtcatcgtcgcaggggcgttgctgctctcctcgaagtcgttcgttgccgaaacgaagaaattctccgcgaacgcgcaagccgaaaaaaccgttcccgacggcaccgaatccgccggaaaataa

SEQ ID NO: 2414 - DNA, 2673 bp, unclassified Clostridiales
atgaaaaaagaaaccgacgggttgcggaacaaagcgcggcacgcggaaaacggcaaggagggcaaaattatggatatgaaaaaatttaccgagaaatcttcggaagcgctggtaaacgcgcagagagtttccacggaatacggcaacgccgatatcaatcagttgcatctgttattctcgcttttaagcgataaggaggggctgattgccacgctgttgtcgcgtgcgggggtaaacgtttccgcgcttctcgaaagaacgcgtacggaaatttcgcggcttcccaaagtatcgggcggcgaaaaatacgtatccggcgcgttgaacgatctgcttgaaagcgcgcagagttccgcggaacagatgggcgattcctatgtttccgtcgagcatctgtttatggcgttcttcgataagggcgaaagccttgtgaagcgccttctgaaagaagccgggatagataaaaatactttcatgcaggagcttgccaaagtgcgcggcaattcccgcgtcgacagcgaaaatcccgaagatacctacgacgtactgaataaatacggcagcgatctggtggagcgggcgcggcagcacaaacttgatcccgtcatcgggcgggacgaagaaatccgttccgtcatccgtattctttcgcgtaaaacgaaaaacaatcccgtgctgatcggcgaagccggcgtgggcaaaacggcaatcgccgaagggcttgcgattcgtatcatgaaaggggacgtgcccgattctctgaaagaccgcaaagtattttctctggatctcggcgcgttgattgcgggcgcgaaattccgcggcgaattcgaagaaagattgaaagccgtgcttgccgaagtgaagaaatcggacggcagaattattttgttcatcgatgagttgcacaccatcgtcggcgccggcaaaacggacggcgcgatggacgcgggcaacctgttaaagcctatgctggcgcgcggcgagctgcattgcatcggcgccaccacgctggacgagtaccgaaaatatatcgaaaaagatcccgcgctcgaacgtcgtttccagcccgtgctggtgggcgaacccacggtggaagataccatctccattctgcgcggtctgaaagagcgttacgaagtgttccacggcgtaaaaattcaggataacgccttaatcgccgcggcgactctttcggacagatatatcaccgacagattcctgcccgataaggcgatcgacctcgtggacgaagcctgcgccaccatccgcacgcagatggaatcgagccccgaagaaatggacgcgctttcgagaaagacgatgcagctggaaatcgaaaagaacgccctttccaaagaaaccgatcccgcttcgcaggaacatctgaaagaaatcgaaaacgaacttgcggaaatgaaagaaaaatacgcagcgttgtccacccgctgggaagcggaaaaacgcgatatttccgcggtgcagtctttgcgcgaagaaatcgaaaaatgctcggctgagctggaaaaagcgcagcgcgagtacgatttgcagaaagcttccgaacttcagtacggcaaactgcccgaactgaaaaagaagctggaagaaagcgagaagaaagccgcggcggacggcgcggacggcaacggcggcacgattctgcacgataaagtaaccgaagaagaaatcgccgaaatcgtggcaaaacgcacgggcattcccgtggcgaaactgatggaaggcgaaaaggaaaaactgcttcacctcgccgataccctgcacaaacgggtaatcgggcagaacgaagcggtggatgccgtggctaacgccattcttcgttcccgcgcgggcatcgccgatcccgatcgtcctatcggttcgttcctgtttttaggccctacgggcgtcggcaaaacgcagcttgcgaaaacgctggcgaagtgcctgttcgacgacgagaaaaacatggtgcgtatcgatatgagcgagtatatggaaaagtattccgtttcccgtctgatcggcgcgcctcccggatacgtcgggtacgacgagggcgggcagctcaccgaagccgtgcgccgtcatccttactgcgtggtgctgttcgatgaggtggaaaaggcgcacccggacgtgttcaacgtgcttttgcaagtgcttgacgacgggcgtatcaccgacggacagggcagaacggtgaacttcaaaaacaccgtgattatcttaacttccaacctcggctctcccgccattctcgaaggcatcgacgaaaaaggcaacctttccgaaacggcgaaaaaggaagtggaagcgctgcttaaaacctcgttccgtcccgaatttttaaaccgtctggacgaaatcgtcattttcaaaccgctgcagaaaggcgaaatcgaaaagatcgtaaaacttttcgtttcgtcgctcagagaaagactcgcggaaaagcggctgactctggaaattaccgacaaagcgtgcgcataccttgcggaaaacggctacgatccggttctcggcgcaagaccgttgaagaggtacgtgcagcaggcggtggaaacgccgctcgccaaagaactgcttgcgggcagattcctgccgggcgatacggtgaaaatcgacgcttccgattccggcgtcatcatcaccaacccgaaaaagtaa

SEQ ID NO: 2415 - DNA, 1539 bp, unclassified Clostridiales
atggaagaaaacaagcagaacgcaaacggacaagcccccgcggcgcccgccgcggctccggaacaaaccgcggaaacgctcgccgaacaggcgcgcatccgccgcgaaaaactggcgaaattgcagggcgagggcaaaaacccgtacgagcaggtgaaatacccggtagacgcggacagcgcttccgtcaaagcgaatttcgaagcgtacgagggcaaaacggtaacgatggcgggcagaatgatgtcccgccgcattatgggcaaagcctcgttttcgcacatagccgataaaagcggctccattcagatttacgttacccgtcaggatatcggcgaggaaaactatctttcctacaaaaaagattacgacatcggcgatattttcggcttcaaaggctttgtattcaaaacgcagacgggcgaagtaacggtacacgtaaccgaacttgtgcttttaacgaaatccctgctccccctgcccgaaaaatacaacggcttgcaggataaggatatgaaataccgcctgcgccacctcgatcttatcatgaacgacgacgtgaagcaaacgttccgtctgcgttcgaaaatcatgaaagaactgcgcgcgtatctcgatgcgaaaggctatctcgaagtggatacgcccgtgctgcttcctcttgaaatcggcgccgacgcccgcccgttcaaaacgcaccacaacgccctgaatatcgatatgtatatgcgtatcgaaacggagctgtttttaaagcgccttatcgtcggcggactggaccgcgtgtacgaagtgggcagaattttcagaaacgagggcatggacgctttccataaccccgaattcaccaccatcgaaatgtatcaggcgtacaccgattacaagggcatgatggatttgatcgaggatatgtacaaaacggtaacgcagaacgtctgcggctcgctggacatcacctatcagggcacggaaattcacatgggcgaatggacgcgcctcaccatggcggaagccgtggaaaaatatgcgggcgttcgctatgacgactggaaaacggacgaagaagcccgcgccgccgcaaaggcaaagggcgtggaactttcccacggcgaagaatccaccaaaggctacgtgctcatcgatttcttcgacgcgttcgtggaagaaaatcttatccaacccacgattatttacgattaccccgttgaaaattcgccgcttgccaagcgcaaggcgtcgaatcccgcgtttacggagcgtttcgaatatttcatctgcgggcatgaatatggcaacgcgttctcggaactcaacgatcccgtcgatcagctggcgcgcatgcagaagcaggtcgacgagaagcgcaaggcgggcaatctttcggcgcaggtggacgaggacttcatcaacgccctcgaatacggcttgcctcccacgggcggcttaggcatgggcgtagaccgtttgattatgcttttaaccgacagcgcgacgatacgggatgtcatattgttccctaccatgaaaccccgccgctaa

SEQ ID NO: 2416 - DNA, 1377 bp, unclassified Clostridiales
atgagcgaacttgcatacaaaagaacaaacgtatacgaagtagcggacaaaaagacgatgaaagaaatcttctcttatgcggaagaatataaaaagtttatcgacgcggcaaaaacggaacgcgaagcttgcgcgtacgttgcagccgaggccgaaaaacacggtttcaagccttttaagtttggcgaaaagctgaaaaagggcgacaaggtatattataacaaccgcggcaagaatatctatcttatccgcgtaggttccgatgacgtgaaaacaagcggaatccgtattgtggcttcgcatatcgacagcccgcgccttgatttcaagcaggtgcctttgtacgaatcggacggcgtcgcgcttggcaaaacgcattattacggcggtataaaaaagtatcagtggacgacgattcctcttgcgctgcacggtgcggttgtgctcggcgacggaagcaaggtggaagtgaagatcggcgaggacgagggagatcccgtattttacatcagcgatttgttgcctcacctttcgcagaaacagaacacgaaaacgcttgcggaggcattttccggcgaagatctcaatatctggttgggtaacattccgtacacggcggcaaaagaggacggcgataagaccgtaaaggaaaatcttttgcatattttaaacgagaaatacggcattaaagaagaggatttcctttccgcagagctttcgcttgtccctgcgttcaaagcgcgcgatatcggcttcgacagagcgcttatcggcgcatacggccatgacgacagagtttgctcgtatcccgcgttctccgctttgttcgatacggaaacagacggcaaaaccgtaatggttgtgcttgcggataaggaggaaatcggcagcgagggcaccacgggtatgcagtgcgctatctttaccgatttaatcgacgcgattgcctattcgttcgataccacttcggctgtcatccgggcaaattcgaagtgtctttccgccgatgtaaacgcggcgtacgatccgaacttcaaagacgtgaacgaaccgatgaattctacgtacgtttcctgcggcgcggggcttaccaaatttacgggagcgcgcggtaagagcggttcgaacgacgcttctgccgaatttatggcggaagtgcgtaaaatgttcaacgacgagggcgttatctggcagacgggcgaactcggcaaggtagatcagggcggcggcggtaccgtggcgaaatatatcgcgaaaatgaacatcgataccgtggatatcggcgttgccgttgtttcgatgcacgcgccttacgaagttatttccaaagccgacgtgtatgaaatgtatctcgcctgcaaagcgtttatgaaataa

SEQ ID NO: 2417 - DNA, 975 bp, unclassified Clostridiales
atggaaagactgatcaggcataccaacgcatataaaacgcagcggttgtacgcttcgcagggaaaattgcgccacgcgtattttctgctttttcccgattccggctctctgcgcgaagttttaaaaattttcgcaacgctgtttttcgaacgcaacgcaaaaaccgaaaccgatcgcgcgcgcgtcgaatctttaattaaaaaagaatcgtacgcggattgtattttttatccggaagcgggcaaaaaattctctgtggcggatgcggaagccgtggaagaggaatgtattctccgccccgtggaaggcgaaacgaaattgttcgtcatcggcgatttttccgaagccacgaaagaagcgcagaacaaaatgctgaaaatgctggaagaaccgcccgaaggagtcagctttcttctcggcgccacctcctcgttttccgtgctgcccacggtcctttcccgcgtggaaaaaatcgaaattccgtctttttccgaaagcgaaatcaccgcgtatctgttaagaaacgttccttctctttccgaacgggacgcggcgttatgcgcaaaatcgtcgggcggtattcccggaaaagcgctcgaacttgcttcgggcggatattttaaagaactcacgcaggcggcatggaatctctgtttttcaacgcccgcttcgcttccttatctcgtacgcgaatacggcgcgacgaaatacccgaaagagcttctgtcgcttcttaaaatcatttatttcgacgcgctgaagcttaaaatcgcaaaagagcgcaacttaacgtttcccggcagcgtttccgataacgaaaacgtgataaaacttgccgggcaatatcggaaaggagaactgttaaaggcgctcaacgtcctttccgacggcgaacgccaactgtatttcaacggctcgttcgcacagattttagaaatctcactcagtaaaattcttgccggaaaccgcggataa

SEQ ID NO: 2418 - DNA, 1488 bp, unclassified Clostridiales
atgaacaaaatcggattcgataacgaaaagtatctttcaatgcagtcggaacatatacgcaagcgcgtggataaattcggggataaactgtatctcgaattcggcggcaagctgttcgacgattaccacgcttcgcgcgtgctgcccggctttgcgcccgattccaaacttcagatgcttcttaaaatgaaagacgaagcggaaatcgttatcgttatcaattccgacgcgatcgaaagctgcaagatgcgcggcgacctcggcattacgtacgatatggacgttctgcgcctcatcgacgccttccgcgaagtaggactgtacgtgggcagcgtttgtctgacgcagttcgccgatcagaagcttgccaaaaaattcgaacgcacgctgaaaaagctggatatcagaacgtaccgccattacccgattgcgggttacccgtacgacgtggacggcatcgtttccgaaaacggactcggcaaaaacgattacatagaaacctcccggcggctggtaatcgtaacggcgcccggtcccggcagcggtaaaatggcaacctgtatttcgcagctttaccaagataacaagcgcggcgtaaaatcgggctatgcgaaattcgaaacgtttcccatctggaaccttccgctgaaacaccccgtgaacgtggcgtacgaagcagccaccgccgatctgaacgacgtgaacatgattgacccgtatcaccttgaggcatacggcgtaagtacggtaaactacaaccgcgacgtggaaatttttcccgtgctcaaccgcctttttcagaaaatttacggcgaagaaatttataaatctcccacggatatgggcgtgaacatggcgggcaactgcattgtggacgacgccgtgtgcgcggaagcttcccggcaggaaatcgtgcggcggtacttcgcggcgctggtggacaggcgcaacgataaggcaagtgacgccgtcgtatcgaaaatcgaactgctgatgcagcagaacggcgttaccacggcaatccgtaaagtagtggctgccgcgcgggacaagcaggcgaaaacaggcgaacccgcctgcgcgctggaactgaacgacggcacgatagttacgggcaaaaccacgcggctattgggcgcggtgagcgcgatgctgctgaacgcgctgaaaacgctttccggcatcgacgataaagtgatgttgttatcgccgagcatcatcgaacccatacagaaattgaaaacggtgcatctcggcgggcataatccgaggctgcattccgatgaaattttaatcgcgctgtccatttctgcggttacaaaccccgtggcggcgctggcaatgcaggcgttggcggggctgaaaggggcggagtgccactccacggtgattttatcgcaggtggacgtaaacgtgctgaaaaaactgggcatcaactacacggccgatcccatttaccagacgaaaaaattatatcatgcaaaataa

SEQ ID NO: 2419 - DNA, 2250 bp, unclassified Clostridiales
atgaaaacggctaaaaaaattctgcttacaatcgtaattttatttttcgctttctttttcgcggcgggcatcgcgtttaccgtgattacgaaaaacgcgcgtctgaacgaaagtcggctggcgctgccgcagggcgaatttaccgtactggataaaaacgacgagacggtgcctgttttttttcgcggcgccgcaaacggctatttttctataaattcgctgcccgaaaacgtaaaattcgctttcgtcgatacggaggacaaacggttttattcgcataacggcgtggattataaaagaatgctccgcgcggcgtggaacaatctccgcgcgcattcgttcaaagaaggcgcttccaccatttcgcagcagctgattaaaaacacgcacctttcgcaggaaaaaacaatcagaagaaaacttcttgaattaaaactgacgagcgagctggaagcgcggtataataaagacgaaattctggaaaaatacttaaattccatttacttcgggcatcattgtttcgggttgaaaagcgcggcggaattttatttttcgaagcagccggaaaatcttacccttgccgagggcgcgctgcttgcgggactcgtgaaatcgcccaacaattactctccgtttaaaaatcccggaaaatgcgcgacgagacgcgcgcttgtgcttcgcctgatgaagcagaacggacacatttccgccgaagaacaacgggaagcggaaagcacgcctttgcctgttgcgtccgcggatttcgaggaagattctccgtacgttgcgcggtgtttcgacgagctggaacggcttgcggacgaaaaacagttgcgccttaacggcggcatacgcgtttttacctttcttgaccaaacgttgcagcacgcgctgacggaaatctgcgcgccggaaacggcggaaaagcggtgcgacgtaattgccgccgcgacggatatttccgcctgcggttttacggcgtattattcgagttgcgggaatcttgcgcgttcgcccgcctcgctttttaaaccgctgtgcgcgtacgcgcccgcattcgaagaaggcattctttcccccgcgacgccgatagacgattcgcccgtcagtttcgacggttacagcccgcagaactacggcggcggttacagcgggtacctttccgcgcgggaatgccttgcacgcagcctgaacgtgcccgcggtgaaaattttaaacgcgctgaccgtgcaaaaaagccgcgggtaccttgaaaaaacgggacttcgcaccgacgaaaacgacttttcgcttgccgccgctctgggcggcgtcggacgcggatatacgctgacagaactgctctccgcttattccgttttcgcgcggaacggaaaatatcgccccgcgggatttatccgccgtatagaaatcgacggcaaaacggtatacgacgccgcgagagataatagcggcggcgaaaagcgagtgttttcggcggaaacggcggcgctgattaccgacgtactgaaaacgtgcgcccgggaaggcacggcgaaaaagctgcgctctctccctttcgacgttgccgcaaagacgggcacgaacggcgacaaaaacggaaatttcgacgcgtatgcgcttggctatacgccggaaatttccgccgccgtgtggctgggcaacgcggacagaacgagaattacggcgacgggcggcggtttgccctgcaacaaactgtaccgtattctgaacgaagcgcaacaaaaccgtgaaaacaaaagtttttcggtgcccgacggcataaaaaaaatcgcgctggataaaaccgactacgagcgcgaccataaactgacgattgcagacgaactttcgcccgaaaactataaattgtacgaattgttcgacgaaagcaaactgccgccgagccgttccacgaaattttcacacccgcagatttccgccgcggaaataaaatacgaaaacggcatcgtgaaaatttcgattccgggagattatccggattgctacgaatacctgctggaacgcgaagaaaacggcataaaacgcgtggtttaccgcggaaagcggcaggaagtttttgcggataccgtggaagaaggaaaaacctacgaatattccgtaacgccatgttataaagacattctcggcgatacggtgtttctgcccgcggtttccacgaaaaacaattttcccgccggtccgtcggaaccgcccggaattatcggaaaagactggtggaattactga

SEQ ID NO: 2420 - DNA, 1536 bp, unclassified Clostridiales
atgaacgtaacggaagaatttttacataaaatccggcagctggacgggtttaataacgcgattatcacgaatatcgacgttttcacgcgcaaaaaagtggtgtgcttttatctggtaaccgatcttgcgtattccgaaagcgtgctgcccgaagcggaagagattgcggaagcgtacatgccggcggggtttgccgcggtggtgcatgcggaaaaacgcacgccggacgaagcgctgctcaggcaggaaatcatgcggtttatgaagagtcgttttcccgcggcttcggcgtttctggaagagaaatatatcgaagtggaaaagcgcgaaagcggggcgttgttctgttttgtgctggcggcgggcgagcaggcgctgtttacggcggataacattctggacgaggtggcgaagcacctgcaaagcaccttttgcggcacgtatttcggtaacgtgaaaatcgccgaaaaacagcgcgaagctttggaagaggagattatagaggacgccgccgcgccgaaaatccgcgtgttccccgtgatgaatttcaaaaaactggacggttcggaaccggagccgaaatacgccacgtatattgcggactgcaattctcaggcggaaaacgtatgtatttgcggcagaattttaaatatcaaccgtcgcgaatcgaagaaaggcaaggaatattattcgataacgcttaccgacgatacgggcaacgtgcgcggcgtgtactttcccaagaagagcacggctgaaaaaatcgcgcagcttgcgccgggcgcttcgattgtgtgcacgggcgatttcgaactgttcaacggcaatatttcctactcgataaaaaaaatcgattacggcgcgcagccggaagggttcgtgcccgaaaagctgccgggaagaaaggtgcccaaggggtatcatcacgtgtttccggagccgtacgaagattatacgcagtccggttttttcgacgacctcgaattgccggcagatttaaaggcgcagacgtttgtggtgttcgatatcgaaaccacggggttgaacagctcgcccgcgtcgggaaaggtggacaggattatcgaaatcggcgcggtgaagatgcagggcgggaacatgacggagaaattttcttcgtttatcgcctgcccggaaaagctgccgccgaatatcgtggaactgacgggcattcacgacgaagatcttgtgggcgcgcccgatatagaggacgtgctggcggatttttacaaatttaccgacgggtgcgcgctggtggggcacaacgttatgttcgattatcgtttcgtgaagtattacggcgaagagtaccgctacttcttcgacgcgaaaacgtacgatacgatgacgatcgggcaggaagtgctgcgcggcgaagtttccaacttcaagctgaacacgctggcggattattacgatatacatttcaatcaccaccgcgcgttcgacgacgcgcttaccacggcgaagatttttcaaaaacttgtgaaaaagcgcggcggcttgcggggactctga

SEQ ID NO: 2421 - DNA, 2016 bp, unclassified Clostridiales
atgaaagtttccgaacttcgcagcatcggcgaaaagcgcgaaaaagatctcctgaaaatgggtgtatccacggcggaagagttagtccgcctgtatccgcgcgcgtatctcgatttaacgcagcgttccacgctgaaaaacgcgctgcacaacgaaatcgtgctcatcgcctgcgaagtgctgcgcctcgcgcccgtcaactacgcgggcaaacgcaccgtcaaagcttactgctcgcaggacggctacgcgtttaccgccgtgtggttcaatcagccgtacgtcgcgcacatgctcaaagcgggcgaatatcttttttacggcagagtgcagcgaaaattcggcgcggtcggcgtcgtcaatcccacgttcgaaccgctcgataaaaattaccgtttaaaaggcgtcgtccccgtctatcctttaaagggctcgctcaaccagaaaacgctgcgcggcgccgtgcgcgaagccttaacgcgcgtttcgctcgaaagcctgattccgccgcgaatcgccgcaaaataccgcctgccgtccctcgaacgcagttattatgccgtgcacgagccccgcacgctcgaagaaaaggacgccggcagcgaacgcgtcgccctcgaagaatatttcgtgcttctttccgcgttcaagcttgtcaaaggcggcaaagaggacgtccgcgttcacaaatataccgttaccgcggcagacgtgaaagagttcgcaagccgcttcggcttcgaatttacgaacggacagaaaaaggcggtgaacgaaatttacgaaagcgtgcactcgcccgtcagaatgaaccgcctgttgcagggcgatgtaggcagcggcaaaacggcggtggcgctgtgcggcatttatatggcggtaaaaagcggctatcaggcggcgtacctgtcgcccaccgaagtgctcgccgcccagaactacgcgcttttaaagaaatttttccccgattacaacgtggtttatctttccggcagtacgggcgcaaaggaaaagcgcgaaatcaaatcgaaaatacaaagcggcgaagcgcagattatctgcggcacgcacgcgattctgcaaaaggacgtcgcgcctcccgcattgtcgttcatcgtctgcgacgaacagcaccgcttcggcgtggcgcagcgcaacgcgttatcggaaaaaggcgagggcgccgacgtgctcgtcatgtccgcaacgcccattccgcgcaccctgtccctcgttttctacggcgatttagacgtaaccaccatcaccgataagccgaaatcccggcaggaaatttccacgtcgattatcccgcaaagccgttacgaagatatgcttgactatatcggcggcgaggtaaaaaagggcagacaagcttattttgtctgcgcaaaaatcgacggcggcgacgacgaggacgacgacggttcgattatcagcgtaaaagagcgttacgaagagctgcaacagcgcttacctgcggtaaaattcgcgctgttgcacggcagaatgaaagacaaagagaaagacgaggtgatgacggcgttcaaaaacggcgaatacgattgcctcgtgtccacaacggtcatcgaagtgggcgtcgacgtgccgaacgccacgattatggtgatttacaacgccgaacgtttcggcttgtcgcagctgcaccagctcagaggcagagtggggcgcggcagcgaaaaaagctactgctttctgctttccgatctggaaacggaaaccgcgaaagagcgcttgtatacgttcagaagcacgtcggacggctttaaaatcgcggaaaaggacttggaaatgcggggcggcggcgattttctgggcacaaggcagtccgggcgaatgttaacggacgtcaaaaatttaaaatacggcgcgcaggtgatatttgaagcgaaaaagctgtgcgacgaaacgttcgaaggcggcttcgacggggaagaattgcgccgtgccgcgcttgccaaatacgccgccctgaaagacgtagtaatgaattag

SEQ ID NO: 2422 - DNA, 855 bp, unclassified Clostridiales
atgaatactgaagaactgaaaacatttatctgtctttgtaaagtaaaaaatttcacgctggctgccgagcagatgtacattgcgcagtctaccgtaaccaaccgcattgtggagttggaaaaagacgtagggaagaagcttttcaaccgcgcttcgaagaaggtgattcttacggaggaggggcgcatctttctgaaatacgccgagcgtattctggagctgcaggatacttccattgccgagatgaacgccgtatcggcgtatcggcagaagattgccgtaggctcggtaaacgccacgtacgaaagctttgtgaaacccgtgctggacaggtgcctgcacgaagcggacgacgttgccgtgaaagtggtgatcgggcattcgatgaacctcattcagatgttgcaggataacgtgctggatatggcgttttcgtcgattccgttgaagcgcgcggggttcgagtgcatggaatacgacacggacagactggcgcttgtcatcggtaagggatacaaccggtataaaggcggcgtggacgaggaaggcttgaaaaacatgtcgtatttaatgtgcgactttttaagcgaaatcggggaatttatccgttcgctgttcccggcagatcatgtgtttaagctggaagtggataattcttcgaagctgctgccgtatctggaagaagggctgggatattcgtttatgccctataagatggtgaaagaaaagattgaagaaggcgtgctggaagaggtgcccctgataggctttaaatcgctgaaagtaatcacgtatctgatttaccgccagaattacgacccgatgacgtttttaaaatacgcgccgaaaaattaa

SEQ ID NO: 2423 - DNA, 1605 bp, unclassified Clostridiales
atgttttcatacagcgaagaacagcttaaatcgttagccagagtggaagaaacgcgcctggaaagaacgggcaaagatttgcgccggctcaccgcggacgaaaaggacgcgcttctggcggcgttccaccccgattatatccgttccgcatataccgatttacaggtaggcgccaacgcgggcgctcccgtattgaaagaacttgccgcgctgttgcagggcacgccccgcattttaagcgaaaaagtagatttaagcaaggtgaaatacgacgtagacgttctgattatcggcggcggcggcgcgggcgcttcggcggcgatcgaagcgaagcgcgcgggcgcaaacgtgatgatggtaaccaagctgcgtatcggcgacgcgaacaccgcgatggcggaaggcggcattcaggctgcggacagagagggcgattcccctgcgattcactatctcgacgcgctgggcggcggacatttcaaaaacaagcaggagttgcttgaaaaactggtaacggaagcgccggaagcgattttgtggctgaatacgctgggcgtaatgttcgataaagataaaaacggcgatatggtggaaacgcacggcggcggcacttccagaaagagaatgcacgcctgccgcgattactcgggctccgaaatcatgcgcgttctgcgcgacgaagtgctgaatctcggcattcccgtggttgattttacttccgccatcgaacttatcaaagataccgacggcaaagccgcgggcgcggtgctgcagaatatggaaacgggcgagattatgattgcgcgcgcgaaaacggtggtgcttgccacgggcggcgcgggcagattgcattatcagggcttccctacgtccaaccattacggcgccacggcggacggcttgattttggcatatcgcgcgggcgcaaagctgctttaccccgaaacgctgcaatatcaccccacgggcgttgctgcgcctacgcagatttacggcgcgctggtaacggaaaaggtgcgctctctgggcgcgcagctggtgggcaaagacggcacggcgttcgtgaatcctctggaaacgcgcgacgttacggcttcgtcgattatccgcgaatgcaaggagcgcaaaaacggcttgcagaccacggacggcgagggcgtatggctggatacgccgatgatcgatttgattcacggcgagggcacgattgaaaaacgtattcccgccatgctgcgtatgttcggcaaatacgggctggatatcagaaaacaaccgattctcgtataccctacgctgcattatcagaacggcggcgtggatatttcggcaaacgcggaaagcggcgtgaagaatttgtttgtggcgggcgaagccgcgggcggtattcacggcaccaaccgtctgatgggcaattcgcttctcgatattatcgtgttcggcagaacggcgggcaaaaacgccgcggcgcgcgcgaaagaaacgaaaaccaagaaattaacgctggcgttcgttgacgaatttgtggcggcgatgcagaaagcgggttgcgaatcggaagaagtttcgccgagattgttgcccgattacagaagaaaagatatgtaa

SEQ ID NO: 2424 - DNA, 1749 bp, unclassified Clostridiales
atgcgaaagactctccggattattgaaataataaaggaaaagtttgcgatgcttgcaaaactcaccattaaaaacgtcgctttgatagaaagcgcggaaatcgaattttcggaaggactcaacgttctttcgggcgaaacgggcgcgggaaaatccgtgattctcgattcgctgaatttcgttctgggcgcgaaagcggacagaacaatgattcgttacggcgaaagcgaatgtttcgtgaaagcggaatttctgctgaacgaaacggacgaagccgtgcgcgaacttgcggaaatggacatcgaaagcgacggcgaaatcattatttcccgcagattttcggaaaccgggaaaaattcgattaaaataaacggctcgacggcaacggcggcgatgctgaaaaaaatcacggcgaaactggtggacgtacacggacaaagcgaacatttttatcttttatccgaagcaaatcagttaaagacgctcgacggcgtgtgcggcgctccgcttgcttcggaaaagcttgtactgcgcgaatttttaaacgcgtacaagacgaaaaaacacgaacttacgcttctcggcggcagcgaggaagaacgtgaacgccgcatggaaattctgcgttttgccgtcgacgaaatcagaggcgccgactggaaagagggcgaagaagaggaattgttgcaaaagcggacgaaaatcaataatctcgaaaaaattcttttctccgtaaaagaggcgctggaatatatttcctccgacggaggcgcgtgcgacgccttgcgcggcgcgcggcgcgcgctgaacgcggtagcgggactggataaagaatacgaaaagcttacggataccctcgaaaatatcgccgaggaagcggaggacgcgtcgtctgcgctttccgaaatcgccgacgggctgtatttcgacgaaaacgaagcgacctatgtagaaaaccgactggacgaactgcgttctctgcaacgaaaatacggagtaaaaacgcaggaagaaatcgttgcattgctttcggagaaagagcgggaatacgacgcgctggcaaacagcgccgagcgttcggaaaagttgcggaaagagatttccgggctgttgaaaaagattctggaaagctgcagaaaacttaccgccatccgtaaaaaagcggcggaaaagttctgcgcgggcgtgtgcgacgagctgaaaacgctgaatattccgcacgcgcaattctctgcagcgttccgcgaatatgccgacgaagaggcggtaaacgcgggggaaaacggactggattcgatttcgttcatgttttccgctaatgcgggcgaaccgcagaaaccgctcggaaaaatcatcagcggcggcgaaatgagccgtctgatgctggcgatgaaaacaagactttccgatacaaacggcatttccacgtacgttttcgacgaaatcgacgcgggaatcagcggaaagacggcaaaagtcgtcggagaaaaatttgcgaaaatcgcaaaaacaacgcaaatcatcgcggtttcgcacctcgcgcagattgcgtgtatgagcgacggcgaatttctgattgaaaagaaagaagaaaacggaaaaacgcgaacgtttatccgcgcgctttccgccgaagaacaaaaagaagaaatcgtgcgcttgctcggcggcgagcagggcgaacaggcggcatatctgcacgcggaagaactgctgcagcgtgcgcgggaattcaaagcggcgttataa

SEQ ID NO: 2425 - DNA, 1512 bp, unclassified Clostridiales
atggataaaaactcaaacaaaattatacaacttgccggcgtatcgaaatcttacgacggcacaacgattatcgacaatatcaatttctacgtgcgcaaaggcgaattcgtaacgctgctcggtccttccgggtgcggcaaaaccaccacgctgcgcatgattgcgggattcgaaatgccggacgaaggaaaaattcttctgaacggcacggatatttccatgctgccgccgaacaaacgccccgtaaacaccgtatttcagaaatacgcgctgttcccgcacctcaacgtattcgacaacgtggcgttcggtttgaaattaaaacgcgtggaaacgacgtacgtggataaaaacggcgaaacgaaaacaaaacttgtgccgcttaccaaggcggaaatcaaagaaaaagtgaaaaacgcgctggaaacggtagaccttgccggtttcgaaaaacgctccatttccaccctttccggcggacagcagcagcgtatcgccatcgcgcgcgccattattaacgagccggaaattctgctcctcgacgagccgctcggcgcgctcgatctgaaaatgcgcaaagaaatgcagctggaactgaaagccatgcacgaaaagctgggcattacgttcatctacgttacgcacgatcaggaagaagcgcttacgatgtccgatacgatcatcgttatgtccgacggatgtattcagcagataggcacgccggaagatatttataacgaaccgaaaaacgcgttcgtggcggacttcatcggcgaaagcaatatcttcacgggcgtgatgccggcggataaccttgtgcgcttctgcggcaaagctttcccctgcgaggacggcggtttcgaaaaagacgaacccgtagacgccgtggttcgcccggaggacgtaaaactggttccgcccgcggaaggtcagctgaaaggcaaagtaacttccgtaatattcaaaggcatacactatcagattcttgtgcaatgcggcagatacgaaatagaagcgcgcagcaccgcggcgcccgcggtaggcgcgaacgtcggtttaaaaatcgaaccggacggcattcacgtaatgaaaaaagtattccgcgtcaaccgtttttcgggcgtgattaccaagaaaaataccgtggaattcggcgacggagaattcgaatgcgacgttacgcagctgtataaaggttctcatctcgacgaagagggctatctgattacggcgaaaggcgaaaaactggacctgacgggcacggaagtcaacgtggaagtaagtttgcacgatattacgatgagcgacgatcccgaagaaggcggcgcctgcggacatattatttcgctgatttacaagagcgaatattaccgctatatcgtgcgtacggaaaacgaggaagattacgtgcttgcctgcgaagatctctggaacgaaaacgactttgtatcgcttgtgattccgaaagataaaatcaagcttaccctgaaaacggcggaggaaaagttgtaa

SEQ ID NO: 2426 - DNA, 1401 bp, unclassified Clostridiales
atgagcgaaaaacgtgcggtaacgatggataagttggtgtcgctttgcaaaaacagagggttcatttttcccggcagcgaaatttacgggggacttgcgaattcgtgggactacggtcctttgggcgtagagctgaaaaacaacgtaaaaaaggcgtggtggaaaaaattcgtgcaggaaaatccgtacaatacgggcgtggactgcgccattttaatgaatccgcgcgtctggaaagcttccgggcatttaagcggcttttccgatccgctgatggactgcaaaaactgcaaatcgcgccaccgtgccgatgatctcgtggaaaaatacgtagaaaagcacaatctcaaaatctcggtggaaggcatggattccgacgaattgcaggcgttcgtatcggagcataaaattccctgccccgtctgcggcaaatccgatttcacgcccatccgcaaattcaatctgatgttcaaaacgtttcagggcgttacggaagataccacgaataccatctatctccgtccggaaacggcgcagggcattttcgtgaacttcgaaaacgtgcagcgttccacgcgtatgcgcgtaccgttcggcatcggtcaggtaggcaaatctttccgcaacgaaatcacgcccggaaatttcactttccgcctgcgcgaattcgaacagatggaacttgaatttttctgcaagcccggcaccgacctcgaatggttcggctactggaaagatttctgcaaaaactggctgctttccctcggcatgaacgaaaatcacctgcaccttcgcgatcattcgcccgaagaattgtgcttctattccaaggcaaccaccgatttcgaatacgatttcgcgttcggccgcggcgaactgtgggggattgcggacagaacggattacgatctttcgcagcatgccaaagagagcggcaaaccgctcgattacaccgatcccgtaacgaacgaaagatacgtgccgtacgttatcgaaccgtcgctgggggcagaccgcgtcgtgctggcgtttttaacggacgcttacgacgaggaagtggtggataaagaaaagaacgacgtccgcgtggtattgcacctgcatcccgcgcttgcgccgtacaaatgcgccgtgttgccgctgcagaaagggctggcggaaaaagcggacgaaatctacgcgaaaatgcgcaaaaaattctccgccacgtacgatctcacgggttccatcggcaagcgttaccgccgtcaggacgaaatcggcacgccgtactgcgtaaccgtagatttccagacggcagaggacggtaccgtaaccgtacgcgaccgcgacacgatggaacaaatccgcgtatcggtagacgaagcgatcgcctatatcgaagaaaagctggaattttaa

SEQ ID NO: 2427 - DNA, 1659 bp, unclassified Clostridiales
atgcagaaaatgcaaagaacgataacgagcgtggatttcaggaagatgatcctgctcggttctcaggcgctcgaaaaaaatcgggcgaaagtagacgcgcttaacgtatttccggtaccggacggcgatacgggtaccaatatgtctttaacgatgcagtcggcggtgaaagaactttccgcctgcaccaccaacgggtttatggaagtatgcgacgccgtttcccgcggcgcgctccgcggcgcaagaggtaattcgggcgttattttatcgcaaattctccgcggcatctgttcggtgattcgcgaatgcggcgaaaatttcgatacgaaaacgtttgcgaaagccatggcggcgggcacgaaagttgcttacggcgccgtttccgcccccaaggaaggcaccatattaacggtcatcagaatgatgagcgacgaagccgtgaaagtcggctcccgcaagaaaaacttcgaagaatttttcgaagccgtcatcgaagagggcgaacgcgcgcttgccaaaactcccgaacttcttcccgttttgaaaaaagcgggcgtagtggattcgggcggcgtgggactcatgaccattttcaaaggcttccttgcctgcctcaagggcgaagaagcgcaggaaatcaccgaagccgatacttccggcgtacagaagatgtccgacgaattcggcgataattccgatatcatcaatctggatctcggcgaaattcagtttgcgtactgcaccgaatttttcattatcaatttaaagaagagcaccacccttgcggatatcgaccgcctgcgcgaacgtctttgcgaactgggcgattccgtcatctgcatcggcgatttagagcttgtgaaagtgcacgtgcatacaaatcagccgggcgtggcgctcacgtacgcgctgcaactgggcgagctcgatcgcccgaagatcgaaaacatgctggaacagaaccgtcagttgcgcgccaaacgcgaggcggaaaagaaagatatgggcatgcttgccatctgcgcgggcgaagggcttgcgggcatcttcaaagatctctgcgtagataaagtcatcgaaggcgggcagacgatgaaccccaccgcgggcgacatcgcttcggcggcgcagaagatcaacgcgcgcgatattttcatcttccccaacaacaaaaacattattctggcggcggaacaggcgaaagatctggtggaaaaccgaacgattcacgtcatccccaccaaaaacgtgccgcagggctttgccgcggcgctccagttcaaccccgaagtttccgtggaagaaaacaaagtgaacatgattcacgaactggataacgtaaaagccgggcaggtaacgtacgccgtgcgcgatacgtcgctgaacggattctctatttccaagggcgacgtcatcgggcttgacgataaaaagattctcgcgaagtcgcagaacattcccgataccgttttaaaactgctcaacaaaatgaaagaggattcgcacgagatgattacgctgtactacggcgaaggcgtttcggaagaagatgccgccgcgcttgccgcgcaggtcggcgaaaaatatcccgattgcgacgtagatttccatttcggcggtcagcccgtatactactacattatttctttggaataa

SEQ ID NO: 2428 - DNA, 1269 bp, unclassified Clostridiales
atgaacgttgttatcggaaaaagcacggcgaacggcaccgtaacggcgccgccgtcgaaaagctatgcgcaccggttgctgatcggcgcggcgctttcccgcggaacaagcacgattgaaaacgtttgtttatccgacgatatccgcgccacgatagactgcgcgcaaacgctcggcgcaaccgtatcttttgcagaaacgccatttccgcaaaccgtccgcgtatgcggtaccggcggaaaacttctgcgcggcggagaatttttctgccgtgaaagcggcagcacgctgcgctttttccttcccctcgctttatgcgcgctttccgaaaatccccgtgcaaacgccgcctcttccggcaaagcgattttccgctgttccccgcgacttgccgaacgcggaatcggcgtctacgaagaggcgcttaaaaacgccgcctctttcgaaaaaatcactgaaaacggcaacggcgcgattaccgtttctggagcgcttctccccggaaaatatacgattcgcggcaacgacagcagtcagttcgccacgggactattattcgccctgcccctattgccggaaaacagcgagctggaaatactccctccagcggaaagcgaaagctatattgccgttactgcggacgttcttaaaaaattcggcgtttgcatcgaaaaaacggcgcaaaacacatggtttatcggcggaaatcaacatttttcttcgggaattttccgtacggaaggcgacgaatccaacgccgcgttttttaaagcgctcaatgccctcggcggcaacgtaatcgtaaccggactgaacaaaaacagtttgcagggagataaaatctgcgatacgctttttaaacaactttcggcgggatataccgaggcggatttaaaaaattgtcccgatctggcgcccgtactctttgccgtagccgcagcaaaacacggcgcgcgtttttccggcacgcgccgtttaaaaatcaaggaaagcgaccgcgcggaagccatgcgcgaagaactggcaaagttcggcgcggttgtaaccgtagcggaaaacgaggtaaccgttcttcccccgccttgcggcttacatgcccccgaatccgtactctcatcgcacgacgaccaccgcattgcaatggctctttcgctgttatgcaccataacaggcggaacgatttccggcgcggaagccgtacggaaaagctatcccgattttttctccgttctctcttccctcggcgtttctctccgccgttacgaataa

SEQ ID NO: 2429 - DNA, 1467 bp, unclassified Clostridiales
atgaagaaaagaacgtttaaaactcttatctgcgccgcgcttgccggcatttccgtgctcggcttttccgcgtgcaatctggaagcgcagaccgcctacgacgttgccgtgaaaaacggttttgtgggaacggagcaggagtggctgaaaagtttacaaggttcgaacggtaaggacgggaaatctcctaccatagaagagatttttgcttcgtggaaacaacagtccggcaatgaaaataaatcgttcgacgaatttctgaaagaatatctgactgtagattataacgagggcaacaatacgaagcagattgccgaaaatcttacctcttccgtttccatttactgcggaatttgtaccgcaacggagtatcgtttcggtggatatcgttacgagtggggcgtttctgccggaagcggcgtgatttattcgttgaatgacggatacgggtatgtgattacgaattatcacgttttatacagcgcttccgcgcgcaacggcgataaagtggctaccagatacgataacggcgagggattggcggataacagcaatattttcgtttatctgtacggttcggcatcatccaacattctttcgcagtcgcaagacggaacgggatataccgacgcttccggtacggcgctgaaagccgagtatgtgggcggatcgatgtcttacgacgttgccgtactgaaaatttacggcgataaccttactgcggcgcaagaagcgaaaacggcgacggcggcgaaaacggcaacaagcggcgttaccgtgggggaaaaggtatatgcgataggcaacccttccggcaacggtatttccgtatcgcaaggcgttgtttcggtggaatcggaatacatcacgatgacggcggcggacgacaaaacgaccacgacttttcacgtgctgcgcacggatacggcgattaaccccggtaattccggcggcggattatataacgcgcagggagctctggtgggcattgtgaatgcgaaaacgacgacttcttcttcgggtacgtcggtggaaaacatgggctatgcgttgccgattgccgacgtgaaagcggtggcggataatattatcgataacggcggcgcgccgaaaaaaccgtatttcggtattacgacgacttcggaggcggcgcacagcgaatggaatgaagtcggcgataaattgattctgaaagaaaccgtgaaagtatattcggtaacggcggaaggagaacagaattccggaatcggcgcaacgaaatttcgggcgggcgatgtgatttgcgcaatatcgattcggcgcggaagcgaggaagttttgaaagttaccgtgaacacgcgcgccgactttacgaattcgttgttgcatgtaagagccggggatacgttatttgtgctgataaaacgagggagcgaatcgattacgctttcatttgaaattacgcagaaaaatttatcgattgcctga

SEQ ID NO: 2430 - DNA, 2439 bp, unclassified Clostridiales
atggacgtaaaagcggtagaaagcaaatggcaggcgcgttgggagaagaacaaggaatacgcgttcaataaaaagaacgccgataaaaaatggtacgttctggaaatgttctcctacccttccggcgcaaaactgcacgtggggcactggtacaattacggccccgccgattcttacgcaaggttcaaaaaaatgcagggtttcgaagtgtttcagccgatgggcttcgacgcgttcggtctgcccgcggaaaattacgccataaaaacgggaatccaccccaaagattccaccgagcagaatatcgccaccatggaaaaacagctgaaaaacatgggcgcgatgttcgactggtcggcggaaatcaaaacctgcgaacccgattattacaagtggacgcagtggctgttcatcgaactgtataaaaaaggactcgcctaccgcaagcaatcgctcgtgaactggtgcccttcctgcgaaacggtgctcgccaacgaacaggcggaaggcggcgtatgcgaacgctgcggttcccccgtgcttcgcaaaaacatgacgcagtggtttttaaaaatcacggaatacgccgaagaactcctcgacggactcaacgacctcgactggccggaaaaaaccaaactgatgcagaaaaactggatcggcagatccacgggctgcgaagtgattttcgaatgcgaaacgggcgatccgattacggtgttcaccacgcgttgcgatacccttttcggcgtaaattacgtagtgctggcgcccgaacatcccttggtggaaaaactgaaagcggcgcacccagaacgcgcgaaagacatcgacgattacgtggcgtacgcggcttccgcgaacgacatcgaccgtctttccaccgcgcgcgaaaaaacgggaacgtttacgggcgcctacgcaacgcacccgctcacaggcaaaaaagtgcccgtgtatatcgccgattacgtgctgtattcgtacggcacgggcgccgtgatggctgttgccgcgcacgacgaacgcgacttcgaatttgcgaaaaaatactccctgcccgtaacgcaggtagtgcagaaaatcggcgaagaaaccgttcttccgttcaccgaagacggaattttagtaaacagcggcgaattcgacggattgtccggcgaagaagcgcgcaacgccatcgccgcaaaactgacgaaagcgggaaaaggcggcaaaaaagtcaactaccgcctgcgcgactggtcggtttcccgccagcgttactggggcgcgccgattcccatgatccactgcgaaaaatgcggcgcggtgcccgtgcccgaaaaagatctgcccgtaaaacttccctacaacgtggaatttcatccgaacggcaaatctcccctcgcttcgtgcgaagaattcatgaattgcacctgccccgtctgcggcggcaaggcgcggcgcgatcccgatacgctggatacgttcgtctgctcttcgtggtattatcttcgctacccggacgcgcacaacgataaacaggcgttttcgaaagaaacggcggataagatgctgcccgtagacgtatacgtgggcggcgcggaacacgcctgcatgcaccttctgtacgcgcgtttcattacgaaagctttgcgcgacatgggctatatttctttcgacgagccttttaagcggcttgtgcatcagggcgtgattttaggcccggacggcaaccgcatgagcaaatcgaaaggcaacgtggtttcgcccgacaaatacgtggaagagtacggttccgacgtcttccgcctgtatctgatgttcggcttttcttacaccgagggcggaccgtggaacgacgacggtatcaaatcggtggcgaaattcgtggaaagaacggaacgcctgattgtaaaagcgacgaaatacgagccgatgaaaaaaggcttcgcactcggcgccgccgaaaaagaactggactacgcgcgcaactacgccatcaagagcatcacgcgcgacgcggaagcgttctccttcaacacttcggtggcaagactgatggaatacgtaaacgccctttccaaatacgattcgcttgaaaataaaaacgaaagcttcatgcggctttgcgcggaagacctcgtgcgcctgtttgcgccgttcgcgccgcacaccgcggaagagttctgggaaatgcttgggcataagagctcggtattcgaagaacgctaccccgtggcggacgaaagcgcgctggtgaaagacgaaacggaatacgccgtacaggtaaacagcaaaatcaagtgcaaaatgatggtggcgaaagacgcgtcggaaaatgaaatcaaagccgcggcgagcgcgcgcgaagaagtcgccccgctgctggaagggaaaacgctgaaaaaatgcgtcatcgttcccggcagactggtgaatttaatcatcgggtaa

SEQ ID NO: 2431 - DNA, 1395 bp, unclassified Clostridiales
atggcacacgcaagaatcgagagcgattccataggctctcttgaaattcccgaaaacgtatattacggcgttcagaccgaaagaggttgcagaaacttcgatatcaccggaattaaaatgaacggtcgttttattaaaaacatcgtcagaatcaaaaaggcggcggctatcgtcaatgcaaaagccggttcgatatccgaatccacggcggaagccatcgtaaaagcctgcaacgaagctttaagcggaaaattcgacgccgatttcgttaccgacgccattcagggcggcgcaggcaccaccgtgaacatgaacgtgaacgaagtcatcgcaaaccgcgccacggagcttctgggcggcaaaaaaggcgaatacctctgccatcccaacgatcatgtgaattgttctcaatccaccaacgacgtcatccccaccgcaggcaaaatgacggtaatcgaattttcggaagaactgaaaaagactttaacctctttaatcgaatcgctggaaaccaaagcccgagaattcgacgacgtcatcaaaatgggcagaacgcagctggaagacgccgttcccatccgtttggggcaggaattcaaagcctatgcttcgggcatcggaagaaaccttcgcctgattgaaaagtctttgaacgaaatgcgcacggtaaatatcggcggcacggcaatcggcacggcgattaacgtcaaaaaggaataccttgacggcatcgttcccgaactcaataaagaaaccggctacaatttaaaacaggcggaagatttaatcgacgccacgcagaacaccgacggatttgtttacgtttccggtacgctgaaaacgctggcggttaccctgtcgaagatgtgcaacgatcttcgtcttctggcaagcggaccgaaaacgggcctcgaagaaatcatcttaccggcaaaacagaacggctcctccatcatgccgggcaaagtcaaccccgtcattcccgaagtcgtttcgcaggttgccttttccgtgatcggcaacgacacggcgataacgcttgccgcggaagccgggcagcttgaattaaacgcattcgaacccgtgattttctacaaacttttcgaatcgctgcacactttgaacaacgcgattaaaacgctcgttacgaattgcatcgaaggtattcaggtaaatcgcgaacgctgcgcagcgcttgtttacgaaagcgtcggcacggtaacggcgctcaatccgtatatcggctataaaaaggcggcggaacttgccaaggaagcattgaaacgcaacgtaaaaatcaaagatctcgtcatcgaaaaacatatgatggacgaagaaactctggaaaaaattctcaacccctatgccatgacggaacccaaggaaagcatataa

SEQ ID NO: 2432 - DNA, 1194 bp, unclassified Clostridiales
gttcggcgtttgcccgcttccccgcattttaattataccatactcgcgcctcgccgcaaagatacaatcataaattttcataattctttttataaattttattttttttcattttttgttgcttttgtatcaagaatgtatcacgatagtgaaaaaaacgttgttctccgcgaaaaactcaaaaaaatttgtcggtttgccgcgctttcctttacaacggagaaaaagtgtgatacaatagaattacacttaacatcagtcggtgcgtattttcgcgagcattacgctcggcgcgccgaagcggaggaaaatatgtattatgaaattgaaaacgccgagctgaaagtgggcgtcgaaacgaaaggcgcgcagttaaaatccatccgttcgaaaaagacggacacggaatatctctggcaaggcgacgaggaattctggaaaggcagagcgtacaatctgtttcccatcgtcggcagggcttacaaaaacaagtacgattatgagggaaaaacttacgaaacgcgcccgcacggcatcgcgcgcgacaacgaatttgttttagccgaccgtacggcaacgaagctttcgtttgcgctgacgtacaccgaagcgacgctgaaaatctacccgtgcaaatttatcttttacgtaatttatgaaattttcggggcaaatttaaaagtttcctaccgcgtacaaaatctcgaacagaaagaaatcgcattctgcctcggcggacatcccggcttcaacgtgcccttccatccctccggcgacttcgaagattacttccttgaattctccgaaaaaacggcaatcaagcagtgtttgacggcgccgtcgaaactgatttcgggcgaagtcgttcctttctctttgcatgcgaacaatcgcgtcccccttacgcacgatcttttcaaagacgacgccgtgatttttgcgaatacctgccgcgaagtttcgttgaaacgcaagcgttcgaaacgctatttaacgctgcgctatcccgatttccgttatctcggcgtatggcagacgcccgatcaacccgcgccgttcgtatgcctcgaaccgtggacgtcgctgcccgccaccgacggaaaacgctacgaccttttcacgaaagacgacgcgctgcatctcgcggcggaatccgcgtacgaaacggcgtggacgctggaactgcacgaataa

SEQ ID NO: 2433 - DNA, 2814 bp, unclassified Clostridiales
atgcaggaaaatatcgtcgtcaaaggcgccaaagaaaacaatttaaaaaatatcaacgtaactattccgcgcaacaaactcacggtgttcacggggctttcgggcagcggcaaatccacgctcgccttcgaaaccattttcgccgaggggcagcgccgctatgtggaaagcctttcttcctatgcccgccagtttctggggcagatggaaaaacctgacgtagaaagcatagagggcttatctcccgcggtgagcatcgatcagaaaaccacttcgcgcaaccctcgttccacggtgggtacggttacggaaatttacgattatttccgtcttttgtacgcccgcgtcggggtggtgcattgcccgaaatgcggcagagaaatccggcaccagacggtggacgaaatcgccgataaagtgatggctatgccggagggcagcaaaattttggtcaacgcgcccgtcgtgcgcggcagaaagggcgaatacgtaaaagaactgcaaaattataaaaaaaacggctacgcccgcgtgaaaatcgacggagccgtgtacgatttgcaggaagaaattcaccttgaaaagaatatcaagcacaatatctcggtggtggtagatcgccttgtggtgaaagagggcgttttaaaacgccttaccgattcgctcgaaaccgcgcttaaacttgcggacgggctggtcgttatcgattgcgacggcaacgaagaattgttttccacctcgtacgcctgccccgattgcggcgtttccatcgaagaagtagaaccccgtctgttctcgttcaacacgccgtacggcgcctgccccgattgttcggggctcggattcaaacagcttgtcgaccccgatctcatctgcccggataaaaccaaaactctgcgcgaaggcgccatacacgtggcgggctggtgtctcgaaagcaattcgcaaacgcagatgtacgtcaattcgcttgcgaagcgctacggcttctcgctggacgttcccgtcaaagacctgccgaagagcgtgtacgatttgttgatgtacggcaacggcggcgaaaaattcgatatgtcgtattccacgcgctcgttttcgggcagctacaaaatgtcgtgggaaggtttcgtcaacaatcttcagcgccgctacgcgcaaacctcgtcggacggcgtgaagtacgatatcgaacgctatatgcgcaccatgccctgcgatacgtgcggcggaaaacgcctgaaaaaagaagcgctcgccgtaacgatcggcggcttgaacatctacgaattaacctcgctttccgtggaaaaattgctcgattttctggacggactgcaattcaccgaaggcgaaaagctcatcgcggagggcattttaaaagaaatccgcagccgcctcggcttcctgaaaaacgtagggctgcaatatcttacgctttcccgttcggcggtggggctttcgggcggcgaagcgcagcgtatccgcctcgccacgcagatcggcagcgcgctcacgggcgttttgtatattctcgacgagccgagcatcgggctgcaccagcgcgacaacgaaaaactgctttcttccttgcaggggctgcgcgatctcggcaatacgctcatcgtggtggaacacgacgaagacaccatccgcgcggcggattatatcgtggacatcggtccgtatgcgggcgtgcacggcggcgaagtggtggcgtgcggaacgcaggcggacattatggcggagccgcgttcgattacgggcgattatctggcgggcagacgaaaaatcgaaacgccgaaaacgcgcgtgcagccggacgggcgctggctggaagtgaaagattgcaggcaaaacaacctgaaaggcataaacgtgcgttttcccgtgggacttttcacggctgtaacgggcgtatcgggcagcggaaaatcctcgctcatcaacgaaattttatatcccgcgctggcggacgaactgaacggcgcacggcttcccaaaggcaaatcgggcgaaattctcggcatggaaaatttcgataaagtgatcgccatcgatcaatctcccatcggcagaacgccgcgttccaaccccgccacctatacgggcgtgttcgggctcatccgcgaactttacgccgccacgcaggacgcgaaagagcgcggttacaaagcgggcagattttccttcaatatggcgggcggcagatgcgaacactgcttcggcgacggcatcattaaaatcgaaatgcactttctgcccgatattttcgtgccgtgcgaagtctgcggcggcaagcgatacaaccgcgaaacgctcgaagtgaaatacaagggcaagtcgattgccgacgtcctcgatatgacgatcgacgaagcctgcgagtttttcaaacccgttccgtccgtctacaacaaaatcaaaacgctcgaagaagtgggcttgggctacatgaagctcggtcagtccgccacaacgctttcgggcggcgaagcgcagcgcgtaaagcttgccaccgaactttcaaagcgttctacgggcagaacggcgtatattctggacgagcctaccacggggttacattcttacgatgtggacaagcttttaaaaatcctgctccggctccgcaattccggcaacaccgtcatcgtcatcgaacataatctggacgtcatcaaatgcgccgattatatcgtggatctcggtcccgaagggggcgacggcggcggcacggtggttgcgtgcggcaccccggaagaggtggcaaacgtcaaaggcagctatacgggcttgttcttaaagaaaatgctgtaa

SEQ ID NO: 2434 - DNA, 2331 bp, unclassified Clostridiales
atgcggagtttgaagaaaaaacttaccgtgcttcttgctatggctacgcttgcgtgctcggcggcaacgctcgcttcctgcgctggcagcgatttcacgccgcccgctcaggcggataccacaagcgacaaggttacttccaacggcgggttccttgtggaaacgggggattacgtatactttatcaacggcgcggcggaagcttcggcggataacacctacggcaaagtgcagaaaggcgcgctgtatcgcattgcgaaatcggcgttgaaagcaaaatcgtacggcgcggcggagtgcgtggtgccttcgctgttcgtggcgcagaattacgacggcggcgtattcatttacgataattacgtgtatttcgcttcgcccaccaacgaaaaggaaaaggacggcaccgtttccacttcctggctttcgttcaagaaagtgaagctggacggaacctcttcgaaaaaggaagcggacaagtatctgttccgtctttcggacaatacggtttcgtaccgtttcgtgaagggcgcggacggcgtggtgtactgcatgtacgtgcaaagcagcaacctctattcgttcaacacggatacgggcgttaccacgcttttggtgaaaggcgccgagaattattatttcgataccgaaaaccttgaaaacggcagcgtgtactatctgatgaaagtgcccaccgcgatgacggcggacgcgggcaaattcggctacaatcagttgtaccgcgtttcccccgaagccaccgcggaaacgaacgcggacaaagccgcgtataccgtgaaagacggcgcgggcgaatataaagaatacgcgttcgacaaagcgagccttgtgaagaacaacgcggatttcgacggcggagatattgcgcagtacccgtacgtgaacctcggcagactggttttggacggcagaggcggcatcgatccgcaggatgcaaaaacgacgttcaacgacgcggacgagaacaacgggcacgcttcttacacctacgcggtgctttcgtacaagggcggcagagtgctttttacccgcaagggaagcctttccgacgatacgcccgtatatacctttaaagacgagcagacgaagagcggctggaacacggtaacggcgaacgccgaaaaattattcagagtggcggacaattcgacgaacgcttcggcaagcgcgatttactacgaaacgggcgacaaccttgcgtatctgtacgtttcgaacaactatatctgcagaacggaagtgagcgcggacggtacgcttatcgaggacggcgaacggcttgccgaaacggtggcgagttccgcaacgctgtggaaaacggaaggcgaatatctgtactattacggttcggcggatgccgggaacaatctgtaccgcctgaaatacgacggcgcggcttccgcttaccgcaagaaccttttgataggcgacgaggacaacagagacgcggaatattcccccgcgaaaattccggacgtgcagtggaacgattcctggtataagcccgaatttgcggacaatacgctgttctattgcaacgcgcagtcgttcggttcgaagtctttcgactatatttatacggcgaatttaagcggcagcggcgaaaacggcgcgatgacggcggcggaactgaaagcgttgaacgaaaagtatacttccgttacggattatttttccgactgtgcggatacgggcgacgacggcgaaagcctgaaacttgcgctgcagtattatttccgtacgggcgagctgacggcgtacgacgaatttttgaaagaggcgaaaaagcagggctataaggattactaccgctacggcgaatatgcgcaggcggaaatcacggcgttcagaaatcatacggcgcacggcgaaaacgattttgcgacgaagtttaaagacggcgacgaatattacgatagggaaacttactttatcaaccgcatcggcgcgatgaagaaatcggacgcggaagcgattgaaaaaatatggcgcaccgatttcgtgaagccgctgcccgatttatcttccgacgacggcgcctggtctacggcgaaaaacgtgtgggtttcgattgccgttgcggcgggtgcgattgcggtgattacgggcattacgcttcccatcgtgatttcgcataaaaagaaagccaagcttgcggcggacagagaagccacgagagtgagaaaaccgaagatcgatactaccgacgataagagcatcgatgtgtacgcgacggaagaaaagcccgcggaaaccgcggcggaaacgacggaaaacgccgacgggactgcggaaaataaagaggaataa

SEQ ID NO: 2435 - DNA, 1377 bp, unclassified Clostridiales
gtggtagagcgtcaccttgccaaggtgaatgtcgcgggttcgagtctcgtttcccgctccatctttgaagaacgtctgcgttttgcgcaggcgtttttctcttctttttccgtttatccatattttgctcatgataaatcccgcggatttacaaaccaaccggaggttatcgccttgaaatccttaaaagaattgtataaaatcggcagaggtccttccagttcccacaccatcggaccggaacgcgtggcgtactacgccgtcgaaaacttcggcaaaggcgattacacggcggaattattcggttctctcgctcttacgggcaaagggcacggcaccgatcgcgtgctgaaagaagttctcggcgaaaacacgaagattattttcgacgcgcgcgcaaaagagctgaaacaccccaacacgctgaaattatacaaaacggaaaacggcgaaaacgtccttgtctgcacggcgcagagcgtcggcggcggcagcgtcgtcatcaacggcaagccctaccccgataccccggaagtatatccgcagaaaaatttcgccgccgtccgcaaattcatcgaagaaaacaacctttctctgcccgattacgtaaaattttacgaaccggacgtgtttttttacctgaaaaacgtatggaacgccatgaaagaaagcgtggagcgcggcttacggaaagacggcgttcttcccggcgccctgcggctggaaagaaaggcgaaaacgttgtatttcgcagaagcgaaattcgaaacgtccgtcatgcgcgaaaacagaaaactcgcttcctacgcgttcgccgtagcggaagaaaacgccgataacggaattatcgtaaccgcgcccacctgcggcgccgcgggcattctccccgccgtgttatactatatgtaccgcgataacaacgtgccggaagaagaaattctcaacgcgctcgccgcggcgggcgtcgtaggcaacgtcgtcaaacagaacgcttcaataagcggcgcggaatgcggttgtcaggcggaagtcggggttgcctgctccatggcggcagccgcgctttcttccatattctgcctcgattccgacggcgttgaatgttccgcggaaatcgcgctcgaacacaacctcggcttaacgtgcgatcccgtgctcggtctggtgcagattccctgcatcgaacgcaacgcggtagccgccatcgaagacgtaaacgccgtaactctttcgaaatcgctgaaaaacaaacgcaaaatctcgttcgacaacgtggtgaaagtcatgtacgaaacgggcaaagacatgaacacccgctaccgcgaaacttccacgggcgggctggcttcgttatacggaagcgatgcggataaataa

SEQ ID NO: 2436 - DNA, 1908 bp, unclassified Clostridiales
atgtcaataacatttgctcggtttgaacataaaaatttgctccgtaaaaaacgggggtacgaaggagaacggaaaaagcggaaaatccgaaaaaaacgatttcgcgaaaaattctttaaaaaacccgtaaaaatccgaaaaaaacagaaaaaatttttcgtttatcgtataatcttatttcatttttctttgaaaagtggtataataactgtgtacggggaaaatagacgggagaaaagaaaaattaaaacgcaaaggcgaaaaattatggcagaaattttacagaaccctacgaacttcatcgaacagatcatcaacgaggatatcgaaagcggtaaagtgaaagaaattcagacgcgctttccgcccgaacccaacggttatttgcacatcgggcacgtaaaaagcatgctggtgaacttcggcacggcgaaaaaatacggcggcaagtgcaacctcttcttcgacgataccaacccttcgaaagaaaaaacggaattcgtggaagcaatcaagcgcgacatccgctggctggggtacgactgggcgaaagaagtgtacgcttccgactttttcgataccatttacgcctatgccgaacgcctgattaccgaaggcaaggcttttgtggacgacctttcgcccgaagaaatctccgctacccgcggcacgctgaccgagcccggaaaggaaagcccctataaaacgcgttccgcggaggaaaacctgaaactgttccgcgaaatgcgcgacggaaaatatgcggacggagaaaaatgtctgcgcgcgaaaatcgacatggcttcgcccaacatgaacctgcgcgaccccgttatttaccgtattctgcactgcgcgcaccaccgcacgggcgacaagtggtgcatctacccgatgtacgactacgcgcaccccatctgcgattatctgcagggcgtaacgcactccctgtgcacgcttgaattcgaagatcaccgccctttatacgactgggtgggcatacagctgggcttcaacccgaagccgcggcagattgaattcgcgcggctgaacatcacgaacacggtgatgagcaaacgatatctgaaaaagcttgtggaagaacatttcgtgcacggctgggacgacccgcgcatgccgacgatcgccgggctgagaaaccgcggaattcccccgcaggcgctgctggatttctgcgaaaaagcgggcatcgtaaaggcgaattccgtatgcgaagcgggctatctggaagcgtgcatacgcgataacctgaacgagaacgccgaacgcgcgatggcggttctgaatccgctgaaagtggtgttgacgaactacgaaggcgaagaaatgctggatacgccccgccaccccctgaaagaagagctggggaagagaaaagtagcgttttcgaaagaaatctacattgacggaagcgatttcgcgttggttcccccgccgaaatatcagcggctgaaaccggacgggtatgtgcggttgaaaaacgcgtatatcattcactgcgacgaagcgattaaaaacgaagcgggagaagttaccgagctgcattgttcgtacattcccgaaagccgttcttcgcacgatacgagcggtatcaaagtgaaaggcaccatacagtgggtggacggaaaaacgggcgcggacgcggaattccgccgctacgggtatctactgaaagacgccgaatacgccggacaggatttttcggaacgcatgaacgaaaagagcgaaacgatttgccgcggcaaagccgagccctatcttgccgaatgcgaaaacgacaaagcgtttcagcttatgcgcgtgggatactttaaaaaatgcacggacgaaaacggaaagcttgtgctttcggaaatcgtttctttaaaagataatttcaataaataa

SEQ ID NO: 2437 - DNA, 2472 bp, unclassified Clostridiales
atggctaagtcgaataaaaaagaacccgaaaaaatcgaagcgaaagggcaactttttgttgagccgctggaaaaagtgctgcattcctctatgttgccgtatgcggaattcgttattctcgaccgtgcgctgccccgcgtggaggacggcttgaaacccgttcagcggcgtattttatacacgatgaacgaaatggggctgacgcccgataagccgcacaagaagtgcgcgcgtatcgtgggcgactgcatgggtaagtatcatccgcacggcgattcgagcgtttacggcgccatggtgaatatggcgcaggatttcaatatgggcaaagtgctcatcgacggacacggcaacttcggcagcgtggacggcgatcccgccgccgctatgcgttacacggaagcccgcctcgctccgcccgccctcgaattactgcgcgacatcgataaagatacggtgcctttttcgctgaacttcgacgattctctgaaagaaccggacgttctgccgggaagatttccgaatctgcttgtcaacggcgcgtacggcattgccgtagggcttgccaccaacatccccacgcacaatctggaagaggtgatcaacggcgttgtggcgtacatcgataaccccgcgatttcgctggaagagatgatgcaatatattccctgccccgattttcctacgggcggcatcattattgcgaacgaactgatacaggcgtataaaacgggacgcggaagaatcacgatccgcgcgaaaatttccatcgaacctaccgataacggaaaaacgaatctcgtcatcagcgaaattccctatcaggtgaacaaagcgcagctgcttcgccgcatcgtggagctttgcgaagaaaaaaaggaagaactggcggcggtagatcatgtgtccgacgagtccgaccgcgcgggcatgcgcgccgtggtgcgcatcaaaaaaggcggcgacatccgtcagattttaaaggtactgtataaaaataccgaccttgaaatatccttcggcatcaatatggtggtgatagcggacggcaagccgcagcagctggggctgatggaaatcctccgccattacgtggcgtaccagcggcaggtgattctgcgccgtacgaagttcgatctgaacgaagcggaaagccgttgccacgtgttggaagggctgattatcgccgtgcgcaacatcgacgaagtgattgccattatcaagtcggcggaaagcaccgcggacgcgcgcgcgaaattgatgaagcgtttcgaacttaccgaaattcaggcgcaggcgattctggatttgcgcctcgcgcgccttaccaagctggaagtattcaagctggaagaggaactgaaagaactgaagaaactcattaaaaaacttaccgcgatttcgaagagcaaagatttgcagttgcaggtggtaaaggaagaaatttccgaaatccgagataaatatcccacgccgcgccgttcgcgccttgtgtttacgggggcggaagccgacgatttgcttgcggttaccagcgaaaaggtaccgggggcaaaatgcgcgcttgttcgtacggcggatgaaaaaatcaaagtgcttacgggcaaaaacgccgacgcgctttcgctgcccgtatccggaaaattcaaagccggggtgattgcggaggatattctttccacggttacggacaaagtgatttacgcgtttacgaacttcggcaacctgcatcgcctgaatatttcggacgcggcgcttccgtgcaagctttcggacgagggcgtttcgcttgcggagctttctccgggagcggtagacggcgaaaaatgcgtgaaattcttcgaaatcggcgataaattccccgtgggaaatctgctgttctttacggcgaagggcatggtgaaaaaatcttcgtgggaagaatacgagggcatcagaaaagacgttctgcaagccgtaaaagtggcggacgacgacgagctgattgccgtggaagaggaacgcgaagaggaagaaacgatgctgttcgttacggaacaggggtactgcctgaacgcgctgaaaaacgatattcctttgcagggcagagtatcgggcggcgtgaagggaatcatgcttcgcgacggcgacaaagtgaagtttgtatcgcaggtgaacggcgagggcgaaatcgtaatcgtaacgagcgaaggaaagttcaagaaagtgatttcttcgcagatcgacgtatcgggaagatacaagaaaggttcgatgatcgtggctctgccggacggcgcgaaagtgctttccgcaagctacgtaacggtgccgtataagattgccgtggtggaaaagggaaacaagatttcctgtatttcttcggaggacgtgcccattgcgatgcagagcgcgaaagcccgcaagatttccgcatacgacgagtgcagcgtgattgcggcgtaccctttaaggtatcagacggaagaataa

SEQ ID NO: 2438 - DNA, 1956 bp, unclassified Clostridiales
atgaagttttggcacacgaaaagaggacatgcgacgtttttgctggtaatggacgtgctttcggtattgctggcggaaacgatcgctttttttgttacggacacggcgcccttcggcagagaaattctgttgtggatgggcgcaaacgtggcgcttgccgtgctgtttttgttcctcgcgcagggatatgccgtcgtgttttcgctgacgacgcttttcgacgcgttgaaaatactgcttgccgtggcgttgcaggcggcgctgaatatcgtttttgcggcggttaccggtcagcgcgtcgtttccgtttccaccgtgctggtattcggcatatttttaatgaattttgcggtgtattcgcgtttctgcaagcgcctgaacgaaacaatcggcgtatttttccgccgcggtttcaagggcaaaaagcgcgtgatgatcgtgggcggaggcgaaaccgggcttctgatcgtcaaggagcagtgcacttcgaagcgcgcttcttttcgccccgtatgtattctggacgacgataaaaacaaacttggcaagcacattttaaacgtaaaaatcgtgggagatatcgcctcggcgccgcaaatggcgaaaaaatataacgtggacgagatctttttcgcgattccttccgcgtcgcgccggcggcagaaagaaatcatcaatattctgaaagactgcaaaaaacccgtgaaaattctgcccggcattttcgaactgaccgacggaaaagtaacggtatcgaaattccgcgacgtggaaatcaccgatcttctgggcagagaacaggtgcaggtagatctgaatcagattctcggctatatcgaagataaaacggtgctggtaacgggcgggggcggttcgataggcagcgagctgtgccgccagattgcgacgcatcacccgaagcgcctgattattctggatatttacgaaaacaacgcgtacaatatcgaacaggaacttaagcggaaatatcacgaaaacctcaatcttttaacgctggtagccagcgtgcgcgatatcggaaaaatgcgcgacgtattcgaaaaataccgcccgcagattgtgtttcacgcggcggcgcacaagcacgtgccgctgatggaaaccagccccaacgaggccgtgaaaaacaacgtgttcggcacgctgaacgtggcgcggctggcggacgaattcgccgtggaaacgtttgtgcagatatctacggataaggcggtgaatcccaccaacgtgatgggctgtaccaagcggatctgcgagatgattattcagacgatcggcaagcacagcaaacacacgaaattcgtggcggtgcgattcggcaacgtgctcggctccaacggttcggtgattccgcttttcaaacagcagattgccgagggcggcccggtaacggtaacggataaaaacatcataagatattttatgacgattcccgaagcggtatctttggtgatacaggcgggggcatacgcaaagggcgggcagatttttgttctggatatgggcgagcccgtgaaaatttacgaccttgcgcggcatctcattcagctttcgggctacgaaccggacgtggatattcccattatctgcacgggacttcgccccggcgagaaactgtacgaagaacggctgatggcggaagaaggcttgcagaaaacggaaaacggcttgattaacattgcaaaacccatcgatctggacgaaaataagctgtggcatacgctggataaactttatgccgaagcttatgccgaaacggacgagatgaaaaagtatcttgccgaactggttcctacgtatacttacgaggctaaagaagagattattcaacaagacttttctattgcggggaaagccgggaaagcggaatctccggaaaaggaaaattaccgtccgggcgaaacgcttccctcgccgggaaaggtccgggcgtaa

SEQ ID NO: 2439 - DNA, 1419 bp, unclassified Clostridiales
gtgcggaaatacgtaaaaaacggtgcaaaaaagcgtaaaaatcgcctgaaaaacggcgatttttttgcgtttttcgggcttgtacggttgaatttttacgttttttatgctaaaatagagtcggaaacaacgcaaaaacgcgtaaaattacgcaaaaaaacgctgtttccgggaggaaaaacgatgccgaaaaccgatttcagagaagtggcggcggataaacgcaatccgcgctacgaagaatttacgcggcgtgaaaacggactgtattccgaaaaaggcgaggtgcgctcgccgttcgcgcgcgattacacgcgggtacttcactctacggcgtaccgccgcctgaagcataaaacgcaggtgttttacaacatcgaaaacgaccatatttgcacgcggatggagcacgtgctgcacgtggaatcggcggcgtataccattgcgaagcggctgaaactcaacgacgagctcacccgcgccatcgccatggcgcacgatctggggcatgcgccgttcgggcaccacggcgaaagaatcatcggcaagctttataaaaaatatctgaacggcgaaacgttctggcacgaaaaaaacggattgtacctcgccgataaaatcgaactgctgcccgatcacgaaaacgtgtaccgcaatttaaacctcacttacgccgtgcgcgacggcatcgtttcgcactgcggcgaagttgacgaaaacggcgtgaaaccgcgtgaagaactcatcgatctgaatgagttcacgacgcccggaaaatatcaacccgccacctacgaggggtgcgtggtaaaactttccgataaaatcgcgtatgtgggcagagatatcgaggacgcgctgaaccttggctttttatcgccggcaagcgttgcgaaactgcagaaaatcgtgggcttgaaaaacggagaagcggtgaacaccagcacgattatgagcaacatgattttagacgtctgtgccgtttcttcgccggaaaaaggcatttgtttttcggaaaaaatgggggaaacgcttacgaaaatcaaggcgttcaacaacgaaaacatctataaaaacaagcgtttcgcgccgttcaaccgctatgcggaacttgtgataggcgagctgttttatacgctgtattcctgttacgaccgcggaaaccccgtgcgcgggctggaaaagaaaaaacgggcgtatcccacgctggtaagcgaattctgcgattatttgttcaagtactgcgacgacgatttttcgcgcgaggcgggctggaaaaaacaggagtcgtatcggaacgaaaaagtgtacggcacgctggaaaacaggcagatttacgcgcgcgccgtgctggattacatcgcggggatgaccgatcggtttgccgtgaaatgtttcgacgaactgattacctactga

SEQ ID NO: 2440 - DNA, 1770 bp, unclassified Clostridiales
atgaaagcctatatgaaagagtatgaaaactggctgacgaatcccgttttcgatgaagaaacgcggaaagaagtagcggcgatgaaagacgaaaaacaaatcgaggacgcgttctataaacagctttctttcggtacgggcgggttgcgcggcattatcggcgcaggcacaaaccgcatgaatatttacacggtgggcaaggcgtcgcaggggcttgcgaatttcatcaataaaaacgtgaaaaacggcagcgtggctatcgcgtacgacagccggcatatgtcgccggaatttgccaaagcatccgcgctgatttttgcggcgaacggcatcaaggcgtatcttttcgattcgctccgtcccacgcccgaactttctttcgccgtgcgcgaactgcacgctacggcgggcgtagtcattacggcaagccataatccgccgcagtacaacggttacaaagcgtactggacggacggcgcgcagctggtacctccctacgataatctcgtcatagatgaggtgaacgccatcaaagattacgcggaaatccgccgtatgagcgaagaggaagccgcgaaagcggggcttttcgaaattatcggcaaagaaatagacgataaatacgtcgccgcgctgaaagctctggtgctcgataaagacgtcatcaaaaaaatggcaaaagaaatccgcatcgtgtatacgccgttccacggcaccggcaacgtgcccgtgcgccgtatgctgaaagagctcggcttcaccaacgtgtgggtggtgcccgaacaggaagaaccggacggcgatttcacaacgctcgattaccccaatcccgaagatccgaaagcgttcaggttggcgctggaactggcgaaaaaggtggatgcggacgtagtgcttgccaccgatcccgacgccgaccgtctgggcgtgtatgcgaaagatacgaaaacgggcgaatatatgtcgtttacgggcaatatgagcgggctgctgattgcggaatacgaactttcgcgcaagaaagagatgggcttgttgccaaagccgcgcgaaaacggcgcgctggtaaccaccatcgtttcttccaatatggcgtttgccgtggcgaaagaatacggcctgacggcaatcgaagtgcttaccggttttaaatatatcggcgaacagataaagaatttcgaacaggcgaaagcggaaaacggcggcaagtacgatgcgaaaaaaggcgcttacgaatatcttttcggctatgaagaaagctacggctgccttgtaggcacgcacgcgcgcgataaggacgccgttatggcggttaccgcgctttgcgaagccgcggcatattacaaatcgcagggcaaaacgttgtgggatcagatgcaggcgatttacaaaaaatacgggtatttcaaagaatcgctggaaaccatctcgttgcccggcagcgagggggccgaaaagatcaacggcatcatgaacgctcttcgcgcctgcccgcccgaaaacgtcggcggagaaaaagtgcttgccgcacgcgattaccttgccggcgaaagactggatacggtaacgggtaaaaaagaaaaattaacgcttccgaagagcaacgttctctattacgaactggaagaggacggctggtgctgcgcaagaccttcgggcacagaaccgaaaatcaaattctatttcggcgtaaagggcgcggattacaaggatgcgaatagaaaagtggcgaatctgaaaaaaggtttgatgtcgcttgtgaaagaataa

SEQ ID NO: 2441 - DNA, 2043 bp, unclassified Clostridiales
ttgagcggaagaaatggcacaaccgaatacgtcggcgcggcggaaaacggcgcgggcgaagcgcttttcgcacaagagaatcgcagaacgcccgcggtaaaactgcaaaacgtttcattcgcgtacggcgacggcgaaataaacgcgctggaaaacgtatcgctggaaatcggacagggcgagttcgtggcgattctggggcataacggcagcggaaaatctacgctggcgcgcttgatcaacggtttgctgacgccgtccgcgggggaaattttcgtgctcggcatggattccgccgacaggaaaaatctgttcgaaatcagaaaaaacgcgggcgtggtgtttcagaaccccgataaccagacggtggcgagcgtggtggaggacgacgttgcgttcggccccgagaacacgggcgtgccgcgggaagaaatcgggcggcgaatcgatttcgcgctgcgcgcggtgggaatggaagaattccgccatgcggaagcaacgaagctttcgggcgggcagaaacagcgcgtagccatagccggcgttcttgcgttgcagccgcggattattattctggacgaatccacggcgatgctcgatcctcgcgggcggcgcgagataacgtcggtggtgcagaaactcaataaagaaaataaaatcacggtgattgacataacgcactttccggaagaagccatgcttgccgaccgcgcgattgtgctgcatcgcggaagagtggtgttgcagggcaagccggaagaagtgctgaaaagcgaagaagaattgctttcttacaatctcgcgctgccgaaaagcgttaaaatatgcagagatctgcgcgcgcgggggctggacgtgtccgattcgctttcgcccgaagaaatcgcgaaggaaatcgcttcgcagattgcaaaaaacggcggaataacgtacggcggcgcggaacatgcggcgaacgaaacggaaagcaaagcggcgggcggcgcgggaaaaaacgcggatgcggaaagcagaaacatcgtcgattgcagaaatttgtatttttcgtacgacggcgcggaagaacacgcgctgaacggcgtttcgttacagatccgcgagggagaatttttcgggatcatcgggcatacgggcagcggaaaatccacgttcgtacggcatctgaacgcgctggaaaaactgcccacggcgcagaaaaagtacaaaccgaagaagaaaaagaaaaacgccgcggagatttccgaagaaaagcgcaccgttttaacggtggacggatttgacctgacggataaaacaaccgacttttttgcactgcgttccaaagcggggatggtgtttcagtacccggaataccagctgtttgcggaaacggtggctgcggacgtggcgttcgggctgaaaaatttttcgaaaacgccgctgagcgccgaagaaaccggacgcgccgtaaaagaggcgctggaaacggtggggctgaactacgaagaagtgaaagataaatcgccgttcgaactttcgggcgggcagaagcgccgcgtagcgattgcgggcgtcatcgtaacgaagccggaaatcctcgtgctggacgagcccgcggcggggctggatccgctgggcaaggaagaaatcgccgcgcttttgaaaaaagtgcattccgactggtgcaaaaccgtgatcgtggtatcgcacgatatggatgaaatcgcggaatcctgcgatcgcgccgccgtgttttcggatggaaaaatcgcgttttgcgatacgccggaaaaattgtttacgcaggatgcggaagcgttgttttcgctgggactcgatattcccgtaacggcgaaaatttcccgcgcgctggcggcggaaggcattgtcgccccgtccgatctgacggaaaaggggttcgtgaacgccgtggcggaacaatttgccgcgggcagaacggcaagcggcaaaacggagcgtacggaaacggaaatcggcgcggcggaagaaaacggcaatgccgcttcgggcgggagaactgcgggaggcgataaacatgagtaa

SEQ ID NO: 2442 - DNA, 1566 bp, unclassified Clostridiales
gagtttgcacgcagaatgattgcaagagtagaaagctatgcgctcttcgggctggaaggcgtacccgtaacggtggaagcggatatctcgaaagggattccttcgttcgatatggtgggcttgcccgacgcggcggtgaaagaatcgcgcgaacgggtgaaaagcgcagtgaaaaacagcggactgatgtttccgaaccataaaatcaccgtgaactacgcccccgcgtacgtgaaaaaagaaggctcggcgctggaccttgccacggcgatttcgcttttaaaaggcgaaggcgcgctggaagcagacacgaacggaatcatttttctcggcgagcttgcgttaaacggcgaactgcgccccgtgcgcggcgtgctgccggcggtgatttccgcgcgcgaaaaaggttacaaaacgtttatcgttcccgcagaaaacgcaaaggaagcggggtatgtgggcggcgtcgacgtatatgcggcgcgaaccttacgcgaagtggtggatcatctttccggtttttcgcccctctcccccgtgcgttgcgaagaattccgcgcggcgcaaagcgaaaaggcgggcgcggacggaaacaacgacctttccgcgcacgatctgtcgttcgtgaaaggacaggagattgcaaagcgcgcgctggaagttgccgtggcgggcggacacaacattctgtttgtaggccctcccggaagcggaaaaaccatgctggcgcgggcgattccgacggtgctgccggatttatcgtttgaagaggcgctggaaatcacaaaaattcattcggtggcgggaactttgggcgaaaacggaattattaccgaacgcccgttcagaacgccccaccacaccgccaccaccgtttcgctctgcggcggcggaaacaaaacggtgcatcccggagaaatttcgctggcgcacggcggcgtgctgtttctggacgagctgcccgaatacaaccgctccacgctggaagcgctccgacaaccgctggaggacggcgttatcaccgtttcgagagcgggcggcaccgttacgtatcccgcttcgtttatgctgtgcgcaagcatgaacccctgcccctgcgggaactacggctccgccacgcggcaatgcacatgcacgccttccgaaatcaaacgttaccgcgcaagaatatccggtccgctgctggacagaatcgatattcaggtggaagtggacggcgtaacgtacgacgacctttcgggcggagaaaacggagaaacgagcgcggaaatcaaaaaacgcaccgaccgcgcgcgggaaattcagcgcgagcgatatgccggcgaaaacgtgaacacaaacagcgaaatgaacgaaaaagacatacggaaatactgcgcgctttcgaaagagtgcgacgatattctgcgcgaggcattcacttcgctcaggctttccgcgcgggcgcgctcgcgtattttaaaggtggcgcgcacgattgcggacctgtcgggagaagagcgcattttaccggagcacgtaatggaagcggtatcgtaccgcacgtacggcgcggaagaagaataa

SEQ ID NO: 2443 - DNA, 2181 bp, unclassified Clostridiales
atggcagaaaacgaaaaagaagaaaaacaggaaaaaaattcttacagcgcgaaaaatctcgaagtgctcgaagggctggacgcggtgcgtatgcgccccggtatgtatatcggttccacgggcgtaaaagggcttcatcatatcctttgggaaatcgtggataacgcgattgacgaagcagccaacgggtacgcaaataaaatcaaagtggttttgtacaaagacggcagcgcttccgtggaagataacggcagaggtattcccaccgatattcacccgaaagaaaaggtttccggcgttcagctggtattcacgaagctgcatgcgggcggaaaattcgggcagggaaactatcagtattcgggcggtttgcacggcgtgggcgcttccgtaaccaacgcgctttccgaatggctgcaggtggaagtaaggcacggcaccgtgtataaaatgagtttccgttcgttctacaatgcccgcaagaagaaatacgaatcgggcattccggacggaccgcttgaaaatacgggcgtacgcacgaaacttacgggcaccacggtgcgtttcaaaccggacgccgcggtgttttccgaaacgaatttcgaccttgacacggtggaggaacgcctgaacgagctggcgtttttaaaccgcggactggaaatcacgctgaccgacgaacgcattacgatggcggacgcgaagcgcatgcgcggcaatatcgaaaccgacgaagaagagcagggcgaaaatgcggaaaacgcgggcgaaaccgaaggcgctgaaacctacgatcgttccgcctatacccctcacgatttgttcgacgaagcggatgcggcgatgctggaaaaagagccgtacagcgtgatgttcaagtacgacggcggtatcagcgatttcgtgcgcagtttaaacgaggaaaagaaaaagctttatcctacgcccgtgtactacaaaacggtgaaaaacgatatcagtatcgaattcgccgtacagcataccaccgaatacaccgagagcattttctcgttcgtaaacaatattcctacgcccgaaggcggctatcacgaagcggggttccgttcgggaatagccaaggcgttcaacgattacgcgcgaagcaacggatttttaaaggaaaaagacgctaactttcagggcgacgatttccgcgaagggcttacggcggtgctttccgtaaagatgcgcgaagtgcagttcgaagggcagacgaaaacaaagctcggcaataccgaagcccgccccgcggtggaagcggcggtaatcgaagggttcaaagaattcgccaacacccgcggcgcgaagaaaacgtttgaagaaatcattaaaaaagcgcagggcgcggcgaaagtgcgccttgccgcaaaacaggcaaaggataacgcccgcgcgaaaaacagcatcgacggtctgacgctcatcggcaagctggcttcctgttcgggcagaaaaccggaactcaacgaaatgttcattgtggagggcgattcggcaggcggcacggcgaagcaggcgcgcatccgtcagtttcagtcgattctgccgcttcgcggcaaaccgctcaacgtggaaaagaagcggctcagtcagatactcgaaaacgaagaaatcaaaacgatcatcggcgcgatcggcgccggcatcgacggcatcaatccggggttcaatctggataaaatcaattatcacaaagtaattattctttccgatgccgaccaggacggcatgcacatccgttgtattctgcttacgttcttcttccgctacatgcgcgatcttgtgaacgccgggcacgtgtatatcgggatgccgccgctttataaggtgtacaagggcgacaaagtagagtacgcctacgacgacaaggaacttgcggaaaagattgcgaaagtgggcaaagggtatcagttacagcgctataaagggcttggcgaaatgagcgcggaccagctgtgggataccacgatgaaccccgccacgagaaatcttacgcaggttacgattgaggacgccgccaaggcggaacgtatgattaccacgctgatgggcgacaaagtggaaggaagaaaggaatttcttgccaaatacgcgaacttcaacaaacacgacgaatttatggataagatagacggcaaggagggcgcgatcaatggctaa

SEQ ID NO: 2444 - DNA, 2271 bp, unclassified Clostridiales
atgaggggcggctacaaatacgcaaagcgaaagttgtacgaaaagcaaaaaatagggaaggtagccgcctgcaacaaccaaaacaaaaaaattcctgcttttccgttctggcagacgggaaaacggggcaagaacaaaaaaagaacaatacaaggatacaaggagttaaacactatgccgaatttagaaaacagcagaattttcaagaccgattacgcgggaagagaacttaccgtggaaatcggcaagtatgccgaacaggcgaacggggcgtgcctcgtgcgttgcggcgacactgtggtgaacgttaccgtttgtatggcggatcagccgcgcgaaggaatggatttcttcccgctctccgttgattacgaagaaaaaatgtttgccgtgggcaaaattcccggcggattcaaaaagcgcgagggcagagcttccgataaggcgattctcgtaagccgcctcatcgaccgtccgattcgtccgcttttcccgaaaggaattttcaacgacgttgtggtggttgccacggcgctttcggttgaccccgacatcgcgcccgaacccatcgccatgatcggttcttccattgcgctttccgtttccgatattccctgggcgggacctacgggcagcgtgattgtgggctgcatcgacgggaagtatatcatcaaccccacggtggaggaaaaagaaaagagcacgattcatctgtctttggcgggcacgaaagacgccattttaatgattgaagcgggtgcgaaagaggttacggacgccgaaatggtgggcgcgattacgttcggacacgaagaaatcaagaaagtgtgcgcgtttatcgaaggcattgcgaaagaagtgggcaagcccaagagagagatggagctgtatcacatccccgaagatcttgacgcggcggtaaaagcatacggctacgacaaacttgtgtgggcgctggatacgttcgacagacaggaacgcgaggcgcgtcaggcgcaggcggagaaagaaattctcgaacattttgcggacgtttaccccgataagcagcgcgaaatcaaagattccatttactatatcacgaaagcgatcgtgagaaagaagatttttgaggacggcgtgcgccccgacggcagaaaattgaaagaagtacgcccgatctggtgcgaacacggtattcttccgcgcgtgcacggctcggcggtatttacgagaggacagacgcaggctttgactacctgcaccctcggtatgcttgacgaagcgcagagaatggaaggcttagacgaggaagaagaaaaacgctatatgcaccagtacaacttccccgggtactgcacgggcgaagcgaaggctttaagaagccccggtcgccgcgaaatcggacacggcgctcttgcggaacgcgcgcttgtacccgtgattccttcggaagaagaattcccttacgccatccgcgtggtatcggatattctttcttcgaacggttcttcttcgatggcttccgtatgcggttccacgatggcgctgatggacgccggcgtgccgattaaggcgcctgttgcgggctgcgcgatgggacttatcaaagaccccgaaaccggcaaatacgtgattatgacggatattcagggacttgaggacttcctcggcgatatggacttcaaggtggccggtaccgaaaaaggcatcaccgcgattcagatggacattaaaatcaaggggatttccgaacagattatgcttgacgcgattgcgcaggcgcaggaaggcagaagattcattctcggcaagatgctggaatgcatccccgaagtgaacgaccatctttcgaactttgcgccgaagattatttcgtttaagattaaccccgaaaaaatcggcgacgttgtgggcaagcagggcaaagtgatcaataagatcatcgaacagacgggcacgaaaatcgatatcgaagaggacggcaccgtgtgcattgcctgctacggcgacgtggcggcggcgcacagagcgaagagcattgtggaatcgattgcgcacgaccccgaagtgggcgatatgtttgtgggcgttgttgtgcgtatcctttccaaggtaggcgcgtttgttgaatttgcgcccggaaaggacggcatggtgcatatttcccgcctttcgaaagagcgcgtgaatcaggtggaggacgttctgaatatcggcgacaaggtgaaagtggaaatcatcaaaatcggcgaaaagggcgttgatctgaagctgcttgaaaaaatgtaa

SEQ ID NO: 2445 - DNA, 3486 bp, unclassified Clostridiales
atgagaaaaaatacaagcaaaaacaaattgttcgctctccttctcacggcgtttttcgcgtccgcgtcggcgggcgtactttccgcatgctcgaaaaaggacgataccaaggtagatcagtcggaaatctctaccgatcagacgacggattcttcccgcatcaaaaacggttcgttcgaattcgatacggaaaaagaaaccacgcccatcgttacgtcgccgaaaaactggtcgcgctcgtccgttcttacaagcaaagcggcaagcggcgtcgtcgataccgaaacttccgcgtgggacaagctgacgaaatcgggaaacatcaccccgacaagcgaatcggaagccgcggaaaagtgggcggacatgaacacgtacgaccgcctgcaatatattaaaaaatggaaagacgcaaataagaacaagagcgtcgacgacctcaagttttacaaaaaccattacaatatttccgccgacgatattccttccgccgacgtaaaccccggcacgcactacgccgagggcagcgacgaagccaaaaagaactcgaaagtgctgatgattcacaatcagtactcctcgtcgtcgggcacggcgcaaaacttcacctcctcctcttcgctcaccgtccccgcgggtacaagcgcgaagctttccgtatgggtaaaaacggcggaacttacttaccgctacaacaacgaggacaacgcggcggataaaaaccgcggcgcctacatcggtatttcccgcacggtagccggcaagagcaaagatcaggtgaaggtggaaaacatcaacaccgaaaagattcttgccgacgattccattcccgccgaaaacaagagcaacggctgggtgaaatacgaattctacctgaaaggcagcgactatgcaagcagcacgttcaccgtggttctggggctcggtcagggcacctcttcttccgtaatgggcttcgtgaacggctacgcgtttttcgacgacctcgaatgtacgctcatcgaaaaatccgaatacgaaacgcttgccgcaggcgccgacaaaacggcggacgacgatacgacggaattccgcgcggataaagaaaatcttgccgatctgaaatatgccgtagatacgggcgttacgcttaactctcttacgtttgcaaacgccggaatcgcgggcgcggaaaaaatttccgccgacaacaacaatttcgataccgccaacgataagacgggcgtgtttgcgaaaaattccgtaaacacggcttcggaaaacgaatatttcaaagccgtatgggaaagcgacttcgcctcttcctatccttttgccggaacgaacgacgttttaatgctcttctccgcaggcaaaacggcgtatgaagccaccacgggtaccattaccttaaaagccaactcctccgccctctattccgtatgggtaaaaacctcgaagattccgagcggcgctacgggcgcgggcatctcgtacacggaaacggacgcggcgggcaacgccaaatcggaagacgacgaaaagacggcgctgttatcctctatcgattccaccgcaggcaccaaaacggaagtggacgataccgcgggcggcaagaaagaaaacatcttcggcggctggcagcaatgcacgctcctttttgaaaacgacaccgaaaacgataagtacttcactcttacgttcacctacggcgccacggcggacgacgcggaaaaaacggcgtacggcgccggctatgccgcgttcacgaatctcgaagcgatcggctccaacctgattgcggaggacgcgaatccgttcacgcagagcgactacttctccacgggcacgtacgcggcgaaaaagacgttttccgacagcgaggagggcgcgggcttcgcggcgttcgattcgagagcgtacagcgccgacaacacgaagaagggcatcgaaaacggctttgccgacctcgccaactacaagggcgtatggggcggcagcggcaacgttacttcctcgcccgatccgaatgcggataacggcatcgacaacaacccctacgccgggcttgtaaacaaaaactttgcggcggattacgttgccggcggcagatatagcggcgtggcaggtctgaacgagattttcggcgcggcttcctccgtattcgatcaggcggcggaacccctgatgatattcaataaggacgcaaacaaatcgtacggctatctcgcttcctcctcggtttcgatttcgtccgattcgtataaaacgatttccgtccgcgtgaaaacgtccaacgcgaaagccagcatctaccttatcgatgccgacggcgaggacaacgcgtccctcgcgcttgccacgccgaaagtttcctactggtacgataaaacgggcaacgtgtgcacgaaagatccgaagaacgataaaacgttcaagtcctctaccgatacggcgctgtatctcaacagccgcggcttgtacgaagtaaacgcgaagtggtcgaacgacgcttctttgcagaacaagtattacgccaacctttccaactacgaagaggacgaggacggcaacctgcttgtagccgacggcggcgtacagtacaattacgtcgcttccgcctggagcaacgaaggcacggacggcatcgcgttctatcataaggacggggaagaaaaaggcatttactatgccgacaaagcgtgcaccgtgcgcgtgtacgatctgaacgatctggtgaaagccggcaagcttacgccgagaacgattgcttccgaagcgcagggcacggcggcgctggaatacaaggaaatcgaaacgaacggcgaatggagaacgtacacgttctatatccacaccggcagcgaagcgaagaactaccgtctggaagtatggagcggcacgcgcgataacaagagcgaattcgaagcgggcagctacgtaatgttcgcggcggataaccgtacggaactcacttccgacacctggtcgtcgatgcttcgggaaacagtcgaaagcgcaaaaacgcagtcgtatttaagcgacgaagagttctacaagagcgcggcggtaagatactatgcgttctcgttcctcgattcggcgaaattcctgcggtacgattcctcgctggataaagacgacatcggcaacgcgtacacctcgtacgattccacttccgacacttataagttcgaccccgataagaaggcggattacgttacctacctcgcctacgaaagcgacgatcacgaacagaagattacgtttgcggattattcgaaaacggacgtttccgtaacggcggatgcgaaagacgacaactcttcggacggcgacgacaaggacgatacctcttcttccggcatgaacggctggctgtttgcaagctcgattgttcttgcggcggtattgcttcttgccatggtaagcattgccgtacagcgcatcgtgaaaaagaagaacagaacgaaagcgcccaaaaccgcaaaaccctcaaaaaaataa

SEQ ID NO: 2446 - DNA, 1590 bp, unclassified Clostridiales
atgcggctgtcggaactgattgaaagcataaacggcgtacccgtgtacgcggcaaaacgcagaagcggcgaaaaaaaagcggcggaaacggaaattacgggcatttcggacgacagtcggtatatcggaagaggagaagcgtttttcgctctcggcggcggcagcgcggacggtcgcgattttgcggcggaagccgcgcgaaagggcgccgcggcaatcgtcgccgaaacgcctgtggatctttcgggtacggaaaatccgccgccgcagattctcgtgaaagacgcaagggaagccattgcgctcgccgcgtgcgcgttttacggcaatcccgcaaaaaaaatgcgcgtggcgggggtaacgggcaccaacggcaaaaccaccgttacatatcttctcgcttccgttttcgaagcggcgggcgaaaaaacgggcattatcggcaccacgggtattttctacggcggaacgagaatcgccccggagctcaccacgcccgatcccgtattcctgcagaaaacgcttgcggatatggctaagcagggcgttacgttcgtcgccatggaagtttccgcgcatgccgtctggtataaaaaaacggcgggaatcccgttcgctgcgaaaatttttacgaatttctcgcaggatcatctggattttttcggcaatatgcaaacctaccgcaaaacaaaggagcgttttttcttcccggaaacgggcaaagcggagggcgaaccggcggacgtcgcggaagaaaataaaacggaggacgcttccggcgaaaaagcaaacggcgaaatttttgttgtcggcaccgacgacgaaacgggcaaaaaaatcgcggacgaagcaaaaaaacgccggataaaaacgcttacgtacgggctggaaaatccgtcggacgtttttgcggtcatcaccgacgaaagcgtttcgggcagcaaatttctgctgaatttatccgacgaactgtgccgagttacgttgcgacttgcggggcggcacaacatatataacgcgcttgccgccgccggatgcgctttcgcgctcggcgcgccgccgaaagccgttgccgagggcttgaaaaacgcagtccttcccaagggcaggctgcaacgggtacgcggagtgaacggcgcggaaattttcgtggatttcgcacacacgccgggcggactggataaatcgctggaaacgctgaaaccgctttgtaaaggaaagctgtattgtctgttcggctgcggcggaaatcgtgatcgcggcaagcgtgcgcagatgggcgccgtcgcggcgaaaaaagcggatttttcatatcttacttccgataatccgcgttacgaagatccgtccgatatcatcagggaaatcgaaacgggttaccggcgcttttccgaaaattacgccgttttaaccgacagaaaaaaagcgattttttacgccgtgaaatttctgaaaaagggggatattctgctgattgcgggaaagggcggcgaagaaacgcaggaaatcatgggaatcagatacgaatacgacgacgtaaagacggcggaagaggcagtcgaagcgcgaaaacgcggcgaaacggattaa

SEQ ID NO: 2447 - DNA, 2109 bp, unclassified Clostridiales
atgcaggaaacgaaaacgggtaaaaacacttcttccggagaggaaaaggtggaggttatcgcaaaggaaaaggcggaaaaaagcgccgcgggaaagcaggggaaaaagtccgttgcaacgaaaaacgcagggggcagaggcggaaacaacgcgaaaaacgcggagaagaagccggagaacaaggagaagaagcaaagcgagaaatcggcggcgaaaaaacgcgttgagctggcgttgaagaaagaggagcgcaaggcggagaagcagaaatcgaaagcagagcgcgcgaaaaaacgtgcggaagcgcgggcggcgagaaaagaaaaacggcttgcggcaaaggaagaacgcagaaagaagcgtctggacggaaaagaacgccgcaaggagaggaaaatcgcgatgaaagagaagcgggcggcggcgaaagcggaacgcaaggcgctgcatgcgaaacggcttgcggaaaaagaaaaacgccgcgcggcgctgaaatcggaaacgcgcgaggcgcgcgcgaagcgtcttgccaaagaaaaggaagcgcgcattgcggcgaaaaaggaaaagcgcgaaaaaaagtaccgcctgaaattacagcggcgcgacgcggctttgaagagaaaacagcagcggcttgaaaacagagagcgcaggcgcagcgaaaaccatgcgcccggcttcggcggctggctggcggctgtgatttcgctgggcgtggttacgctggcgcttggctccgtggtaacggtgggcgcggtgagaatgaatcaggcggatatggcgctttccacgggataccgcggcgcgctgtacgagctgacggggacgatttcggacgtggacggcgacctttccaaggcgcgcgtggcttccggcagacagacgcagagcgagctttttaccgatttgctggtgaaaacaagattggcggaaagcacgctggaaaaattcccggtggacagcgaaacggacgtgaacatgacggcgtttttaaaccgtacgggcgacgtggcgcagggaattctggaaaagttgcgcgcgggcgaacggctttcggaaaacgattacaagacgattgagacgctgtatgccgtaaaccggaagattttagccgaactgacggagctttcggaagagctgagcgataaagacatggcgatgttcatgagggataaggcgggtaacaaggtgtacgaacacttccgcaatatcgaaaattatgccctcgaagggggcattgccgaggaaaacgagggggggatagccgcgacgaacggctccccctcgggaaattctacaggaaaggagggcgcgaaacagggcagacggggcatttcttcggcgcaggcggaagaggcttgcctgaaatatttcgcggactacgacatagcggagattatgtacgcgggcgaaaccgagtcggaaaaaatcgacgcgtttaacttttcgatgacggacgcgcaagggcggaagatttacgccgagattgcgaaagagaacggcgcgctggcggggttcgattatttcgccgactgttccgcgaaaaatttcgatatcgataacgcgctgacgattgccgaaaattatctggattttctgggatatgaaaatatgacggcggtgtgggtgaacgaaagcggcgtgaacgctactttcctcttcgtgtatgaagaaaacggcgtggcgtactacccggacagcgtgagcgtgaaagtgtgcgaagaacgcggcaaagttgtgggactcactgcggtgaattatctgaataaccacgcgcggcgcggcgggcatatgcctgcggaaacgagagcggaggaaactcttgaaacggcggcgaaaaagcagcctcaacccgcaaaaccgttgaaagggaagaagcctgagatgatcggcgaagatctggcggaaaaggcgttgaattcacgccttacggtgctttcttcgcgcaaagcggtgattaaaaagggagagcgcgaaagactttgctatgaatttgcgtgcagctacggtgaggacggatatttcgtgtatgtggacgcgttcagcggagaggaaattcaggtgaaccgcgtgctggctacggcgcaggggcagtatttgagataa

SEQ ID NO: 2448 - DNA, 2343 bp, unclassified Clostridiales
atgcaccggaccgaacgcagcggaaaaacctttttactttattttacgtttacggcgctttgcgctttatttttctttctcggaaacaattacgagccgtttgcgctggcgctgctgtttgcggcgctttccgcgcacgcgtcgccgacgggctgctgcgcctgttacgcggcgacgtccgccgtggcgctcagcggtaacgtatttcttgtgtgcgcgggagaagccgtgattttattcatcggatttaccgtttacggaaaactctgcaaagaaagcagggaatcggcacgtaaagccgcgcctatcccctttttcgcgctgtttgcggcactggcgctgtttgcggtattcgcgcctttttcggcttattcgcttccgcccgtgttttcttttctgaacgacgcgcttgtgcagaaaatcgccgcgtcggcgctgatctatctcttatctgccgtgttttccgttgcggtgaaggcgattttgttccgccttttgaaatgccgcctgcgcgccgacgaaatcattttttcgcttctgttattcgtactttccggcataggaatgtgccgcgcttttacgccagacgtttacctcggcgcggcgttttttattcttctgttttattctgccgccgtaaaagacgcttcttccgtcgttgcggcgtttgtgctggctttgcctgccgcattgaccggggtgccgctggcaaaattttttgttttcggcgtggcggttgccgcttttgctccgctgggcagacttccttccgttttcgcgctgattttatgctattttttcttcggtatctacgaaaacgtgtttgaaacgacgacttcttatctggtgccgtgggtattgtgcgtgctgttgccgtcgctggcgtttctgattttgccgccttcggcaatcgcgcgtgcggaaaacaagcttgtgttttaccgggaaaaacatctttcgcgcattgccatcaaccggaacagggccgcaatcggcgaacagctgtttgaaatttccgcagttttccgcgaaatcgaaagttctttcacggcgctttcttccgaagattcgaaagacggcgccaaagaatatatgtgtaaatgcgtttccgacggcgtgtgcggcagatgccccggattttcggaatgcaacaaagaaacgaacgcgcgggcgcagattgaaaaactggttgaaataggctgtatcaaaggaagagtaagcctcatcgatattccggaaaagcttgcctctgcctgccgcgaccagagcggactgctgtttgccgtaaacaaacagcttgccgaataccgtaagtatatcgtggaagcggacaatgccgccggcggcagagagcttttatcgaaacaagcgcaggcgatcagcgaaattttaaagggtctggcactggaacaaagcacgcctttcgcatcgcagcgggataaagaaaaagccgtggcgacgactttgcaaaaagcgggaatcgtatgcagcgaaaccatgctttgcaagacgttctccggcgacgattcccccgtgctttcgctggtaacgtacggcaaagcggacgtgaaaaaaattgcggctgtggcttcggaggtcctgaaatcgccgatgatgatttcggaaagaattaccctgtccgatgataaattctgctgtattctgcgcaaaaaacccgtttacgacgcggcgttcggcgtggcaagcatgaaaaagcacggagaaaccgccagcggagatacgcattcggtgatccgcatcgacgaacgaaaatttatggtggcgctttccgacggaatgggcagcggcgaatatgccaaaaaggtatcggaaacggcaatttctcttctggaaagtttttatcgggcaaaaatgccctcggatctcgtgctttccacagtgaataaactgctttctttcagcaaagaagaaacgtttgcctgcgtagacgttgccgtggtagacctggacagcggcaaagcggacattgtaaaaatcggttcgccgatgggatttattttatcggaaaatacgctgaaaatactggaaggagattcgttgccgctgggtattttagaggcaatgcgccctaccgccgccacgtattgcctgaaagacaacgatattctgcttttcgtaagcgacggcgtaacttcggcgttttcctcttccggcgaattactggatgcactgaaaaaaatcccctgctataatccgcaggagattgccgataacttacttgccgaagtgctgcgccgcgaaaacggaaccgcgcaggacgatattaccgtggtggccgtgcggctttacaagggcgcggcgaccgaatccgccgtaagttga

SEQ ID NO: 2449 - DNA, 2427 bp, unclassified Clostridiales
atggaagaacatttgacggaacacaaattgaaacagatgatcgacagcaagctttcgcgttatttcggcgtttcgccgaaagaagccacgcaggaccagatttacaaagccgtggtgatgaacgtacgcgatatcatgctggaaaaacgtcagcaatttcacgaagaacgcaaagcaaaacgcgcgaaacgcgtatactatctttgcatggaatttctgatggggcgttcgctgaaaaacagtctttataacctcgaactgcgcgaaacatatgaaaaagttctgaaatcgtacggcgtaacgctgccggaactttacgaactggagccggacgcggggctgggtaacggcggactcggcagacttgccgcgtgctttctggacgcgcttgccacgggagattatcccgcgatgggcttttctatccgttacgaatacggactgtttaagcagaaaatcatcgacggctggcagacggaacttcccgacgtatggttgccgggcggcgaagtgtggcttacgcagcgtaccgaccacgtataccgcgtgaaattcgacggtttcgtagaggaaaagtggacggagcacggactggaaaccgtgtatcggaacgcgaaagaggtggaagccatagcgtatgatatgatggtgccggggtacagaagcaaagccgtttcggtgctgagattgtggcgtgcgaaaggcgtgcagaatttcgatatgaaacttttctcgcagggagattatgccgccgtgatgcaggaggacaacgaagccgatttgatttcgaaagttctttatcccgcagacaatcaccaggaaggaaaatcgctgcgtttaaaacagcagtatttccttgtttcggcgtcgttacagaatattttatccgaccataaacgccgttacggaacgctttccacgttgcccgaactggcggcgattcacctgaacgatacgcatcccgcgctggcgattcccgaaatgatgcgacttttgatcgacgagaacggaatgggctgggaagaagcctggagcattaccaccggcgtatgcgcgtataccaatcacaccgtgcttgccgaagcgcttgaaacgtggccggaggatctgattgcaagaagattgcctagaatttattcgatactgaaagaaatcaaccgtcgtttctgcgaagatttgtggaaacgctttcccggcgaatggaacaaaatttcgcgtatggcgattatttcttacaacaccgtccgcatggcgaatttgtcggtggtcggctcgcatagcgtgaacggcgtttcgaaattgcacagcgacatcatcaaaaaaagcgtattcaaagatttctacgattatacgccggaaaaatttacgaacgttacgaacggcattgcgcatcggcggtggctgaatcagtcgaaccccgaactttgcgcgcttttggacgattgcatcggcgagggatacgcgaaggatgcggcgaagctggcggacttcaaaaaatacgaaaacgacgaatccgtgctgaaacggctggaagaaatcaagcggatgaaaaagcggcagtttgcggattatgctttcggaaagcagggggtgaaaatcgaccccgaaacgctgttcgacgttcaggcgaagcgtctgcacgaatacaaacgccagcttttgaacgtattgcatatcgttaccgattatatcgcgctgaaagaaaatcccgatttgccgatacagccgaaaacgtatatttttgcggcgaaagcggctgccgggtattatatggcgaaaaaaatcatcaaactgatttgtttccttgccgaagatatcaggaaagacccgaaaatcagcgcaaaactcaacgttgtgtatatggaagattacaacgtaacgatgtccgaaatgctgatgcccgcttcggaaatttccgaacaaatttcgctggcggggaaagaggcgagcggtacgggaaacatgaaattcatgatcaacggcgctctgaccgtaggtacgctggacggcgcgaacgtggaaatggcggagcgcgtgggcgaggagaatatctttattttcggcttgaaatcggacgaagtggcgcagatctggcggaacggatattcttcgagcgcgtattacaacaaagacagtatgctgcgtaaagtgctggaaacgctgattgtgggattcaacggcgaatcgtttgcggatattgcgaattatctgcttacgggctcgcccgttgccgacccgtatatgtgtatggcggattatgattcgtacgtgcttacacagaaccgtatttccgatttgtacgcaaacgacaaacgctcgtggaatcagaaatcgctgcggaatatcgcggcggccggttattttgcggcggaccgtgcgattaaggaatatgccgacaatatctggcacttgaagtctttgaaataa

SEQ ID NO: 2450 - DNA, 1749 bp, unclassified Clostridiales
atgaagcaaatgagcgaaaagcgtcgccgtcgtatagaaaaaattctgtatcgcgacaggcgcggcaaagttattatttacaaccgaattttcgtaatggggctcgccatgctgctgcagatcgcgctggtttcggtattgctcgtaaaagtgttttacacaaattcgcaaaacgccgtgctcacgtttctggcaaccaacgtcgttgcttttctgctgcttctgcacatcatcaacaacaacgataagctttccggcaaattcggctgggtaatcatcattctgctgatgcccgtgttcggtattttaatgttcttcctttacggcgacggtcgtcccacaaaaaagatgaacatgaaaatcaacgccgaaaagcagaaaaactacgcggcgcttcccgcggcgaaatgtattccgggcacgccgcccatgctttccgccctttcggcttcgcagttcttgcgtacgcccaaaggaaaaaaagcggaacaaacggacgataccccccgcgaatttgccgacgaaacggaaaacgcaaagccttgcggcatcacgaaatacctttccgatttcgccggttttcccgtctcttacgacggcgaagccacctacttttcctccggcaaagaaacgttcgaagccatcatggaagcggtgcgcggcgccaaaaaattcattcttaccgaatacttcatcatcgcgccgggaaaaacgtggtcggaatttttagccgcgctcgtaaaaaaggcggaagaaggggtacaggtacgcctgattttcgataacgcgggctgtctgaaagctctccccccgcactacgacagatatgtggaatccctccacgaaaacatcaggtgtcttacgttcaaccccatcgcccccgtgttcacggtgcgcatcaacaaccgcgatcaccgcaaacaaatcgtcgtggacggcgaagtggcgttcaccggcggcatcaatctcgccgacgagtacgtgggcgaaatcgtccggttcggcaactggaaagattcgggcttacgcatccgcggcagcgcggcaaacacgttcaccatgttgtttttcaacgtgtggaacgccttccgcaaagataaagacgacgtgtccttgttctacaatttctccgcacccgtcccctccgatacgcttgcaaaagaacaatctctggcgcgggcgaaagcggcgaaagacggcgagcgcgcctttctgcaaccgtacgacgattccccgctcgataaagagagcgtgggcgaaacggtctatctcgacgttatcaaccgcgcgcggcgctacgtgtggatatacacgccctatctgattctcgacgacgaaatgcgcgtcgccctctgttcggcggcgaaacgcggcgtagacgtacgaatcgtcgcgccgggcatccccgataaaaagcttacttaccgccttaccaaggcaaacttcccgccgctgatgaaagcgggcgtgaagatatatacgtatacccccggcttcgtgcacgcgaagagcgttctcaccgacgacagattcgccgtggtgggcaccatcaatctcgattaccgcagcctgtatctgaatttcgaaaacgccgtatatttctccgattgctcggtagcggacgcgctcaaagcggattatctttccactttccccctctgcaagagaatcgactatccggatctgaaacggggccggctgggcagattcgtcgattcgctgctgcgcgtattcgaaacgctgttttaa

SEQ ID NO: 2451 - DNA, 3900 bp, unclassified Clostridiales
atggaaaaaaacagaattcgaccagtcaaatccggcagaaccttccgtatgagttattccaagtccaacgaagttcttgaaattccgaatctgattgcgatccagaaggattcttaccagtggttccttggcgatggacttaaagaggtatttgatgatatctcccctatcgtagatttcagcggcaatctggagttgcgttttggcaaattccgtctgtgcccggatgaaattaagcacacaatcgaggaatgcaaggaacgtgatgcaacatattccgcaccacttaaggttgaggtcagacttcataataaggaaactgataccattaaagaacatgagatttatattggtgatcttccgttgatgacggatacaggctcctttgtaatcaatggagcagagcgtgttatcgttagccagctggtacgttcacctggtatttattttactatcgaccatgataagaccggaaaagagctgtactcttctcaggtcatcccgaatcgtggagcatggcttgagtatgagacagactcaaatgatattttctatgtaagagtcgatcgtacacgtaagataccggtaactgttctgatccgtgcattaggatggggcagcaatgagcagattttagagatctttggcgaggagccaaagcttcttgcaacacttgagaaggatgtcagcaatgattacaagagcggtcttcttgaattatataagaagattcgtccaggcgagccgctttctaccgacagtgcttccagcttgctgcagggtatgttctttgatgtaagaagatatgatctggcacgtgtaggccgttataaatacaataagaagcttcatttccgcaatcgtctgaatggacatattttagcagatgatgtagtagatgtttctacaggcgagattattgctgaggcaggtacgacctgtaatcgcgcaatcgcaacaaagattcagaactcaggtgttccgtacgtatatgttgatgcagaaggacgccgtgtaaaggttctgtctaacctcatggtagatgcttctgagtatcttaacctgacagaggaagagcttgaagctgctggaatcaatgagcttgtttattatccagtactgactcagatcttagagaagggtcttgagggtgatgagctgatggcagagcttcgtgcaaataatgcagagctgattccgaagcacatcatgaaggaagatatcttaggttctattaactactgcttaaacttagagtatggcataggacaggatgatgatatcgaccacttaggaaatcgtcgtatccgtgctgtaggtgagctgcttcagaaccagtatcgtattggtatgtcccgtatggagcgtgttgtaagagagcgtatgtctacaaacgatccgtctgatctgacaccacagagcttaattaacattaagcctgttactgctgctgttaaggagttcttcggaagttcccagctgtctcagttcatggatcagaataacccgcttgcagagttaactcataagagacgtctgtctgcgttaggacctggtggtctgtcaagagaccgtgccggattcgaggttcgagatgttcactatactcattatggacgtatgtgcccaattgagactcctgaaggtcctaatatcggtttgattaactcacttgcaacatatgcaagagtaaataaatatggatttatcgaggcaccgtatcgtatcgttgataagagtgatgcccaaaatccgcgtgtaactgacgaggttcgctacttcacagctgatgaagaggatgatttcgtagtagcacaggcaaatgagccgttagattcagaaggccatttcatgaataagatggtttcaggtcgtttccgtgaggagacttctgagtttgagcagaaaaatatcgacttgatggacgtttctccacgaatggtattctctgtcgcaacttccatgattccattcctgcagaacgatgatgcgaaccgtgcacttatgggttccaacatgcagcgtcaggcagttccgttaatgttaacagaggctccggtagttggtaccggtatggaagataaggcagcatacgattcaggtgtttgcgtagtagcaaagcacgcaggtgttgttgagcgttcctcctctaagttaattatcgttaagtgtgatgatggtacaagagatgagtatcgtctgacaaaattctcaagaagcaaccagagcaactgctacaaccagagaccaatcgttttcaaggatgagcgtgttgaggctggacaggttcttgcagatggtccgtccacaaagaatggtgagattgcacttggaaagaacccgttaatcggatttatgacctgggaaggttataactacgaggatgctgtccttttaagtgagcgtcttgttcaggaggatgtatatacctccattcatattgaagaatatgcagcagagtcccgtgatacaaagctcggaccggaagagatcacaagagatgttcctggtgtcggcgatgaggctctcaaggatcttgatgaccgtggtatcattcgtattggtgcggaagtacgtgccggagatattctggtaggtaaggtaacaccaaagggtgagacagagctgacttctgaagaaagactgcttcgtgcaatcttcggtgagaaggcaagagaagttcgtgatacatcactgaagcttccacacggtgcatatggtattgttgttgatacaaaggtatttaaccgtcagaatagtgatgagctggctccaggtgtaaatcaggtagtacgcatctatatcgcacagaagagaaagatctctgtcggcgataagatggcaggccgtcacggaaacaagggtgttgtctccagagttcttcctgtagaagatatgccgttccttccaaatggacgtcctctggatatcgtattaaacccgttgggcgtaccttctcgtatgaacatcggacaggtgctggagactcatttgagtcttgctgcaaaagcacttggatttaatatttctacaccagtatttgatggtgcaagcgagagtgatatccttgatactcttgatctggcaaatgattatgttaacatggagtgggatgaattctacgagaaatataaggattccctgcgtgaagatgttatggattaccttggcactcatctggagcacagagagctgtggaagggtgttccgattcgccgtgatggtaaggtaagactgcgtgacggccgtaccggtgagtatttcgacagcccggtaacaatcggacacatgcactacttaaagctgcatcatctggtagatgataagatccatgcacgttcaacaggtccttactcacttgttacccagcagcctcttggtggtaaggcacagtttggtggacagcgtttcggagagatggaggtttgggctctcgaggcgtatggtgccgcttatacactgcaggagattctgactgttaagtctgatgatgttgtaggacgtgtaaagacatatgaggcaattatcaagggcgagaacattcctgagccaggtgtaccggagtcctttaaggtacttcttaaggaattacaggcactggcacttgatgtacgcgtactggatgcagataataatgaagtagaaattaaggaaagcacagagtatggcaacactgacttcagaagtattatggaagacggtggaaagcgccattattctgaggaagaattccagagaaacggttctaccattcaggaagtaaagaatggagagattgcagacgttgatatggatgcttccaatgcagatgattttgataaagatgatatggacgggtcatttgggtctgatggatttgatgcagatgattttgatgatttaggagactcagataactaa

SEQ ID NO: 2452 - DNA, 3528 bp, unclassified Clostridiales
gtgggtatttttgcaaatccgctgacggacctgctggaatatgaagacttttcaagagattttttgaagggaacagatccagtgggcatgacaggctgtattgactccgagaaggtgcattttatgagcacctttcttggagagaaaaaagtgcagcttgttgtgacgtacagtgaacagcgggcaagggaaattgaggaagattataaattattttgcagtcaggtctatgtgattccaccgcgtgacctgatcttttttaacgcagatctgcagggaaatgccatcattgcagagcgcatgaaggcatttgcagcactttatcaaaacgaggcgaaggttatcatcacgacaatggatgcgctcatgagcgcggcagtgccatttgaacagctgatgagtcatgtgataaagctaaaagaaggtgatgagcttgatcttgaaaagctaaagcatgacctgactgtgatgggatatgagcgtgtaggacgtgtggaggagccaggacagtttactgttcacggaggtattgctgatgtatatccattgacaatggaggttccggttagaatcgagctttggggagatgaaatagatacgattcgctgctttgaaccgcagagccagcgctcaatggatcagatcgagtgcgtatctgtttttccagcggcagaggtgatcgcagatgatacggcaagacggcgtgctgtgggaatgattcaaaatgagcttgagagtcagttagctgtctttaaaaaagcaaaggagccagacaaggcgaagcgtcttcgtgaggagacaaaccgcatattagaggcacttggcgaagatgttgtattagaggcaccagacagctatataagctatttttatccgcgcactgttcaactttctgaatattttgatgagaagaacacgttagttttccttgatgagccgatgcgtcttaaagagcgcggtgatggtgtgcaggctgagtttgaggaaagcatgaaaaatcgtctggagcagggctttcttttgccaggtcagacagcgcttttaacaccggcaaaacatgtgcttgctgcttttgagcgcggtcaggttgcagcactgtcttcacttgacagccgcctggctgactttacggtggtaaacagctacgcagtaaatgttcagaacatgaacacataccgtgaaggttttgaacttttaattaaggatctgacacactggaagaaagaaaagtaccgaattgttcttttgtgtccgtcaagaactcgcgcaaaccgcattgtcaatcagcttatagagtatgatcttttggcatattacagcgaggacgaggataaaaagataaatccaggtgagatcatggttacttacggaaaccttcaccgtggctttttatatccgatgctaaaatttgctgttatcacagagagcgatatctttggtgttaagaaaaagaaaaaagaaaaaaagagccactatcagggtcaacgaataagtgattttgcgcagctaaagcctggtgattatgtggtgcatgaaaattatggactgggaatttatcgcggaacagagcgacagattgtggataaggtaacaaaagattatattaagatagaatatggtgatggaggaaagctgtattttcctgtcacacagcttcatatgatccaaaagtatgctgattcagagtctaagcagccaaagcttaacaaattgaacggccaggagtggacaaaaacaaaaagccgtgttcaaaaagcagtcaacaacattgcaaaggagcttgtggagctttatgcagtgcgccagagtggtcacggttatcagtatggaacagacactgtatggcagaaagaatttgaagagcttgtaccatttgatgagacggcagaccagcttgcagcaattgatgcgacaaaagctgatatggaaagtacgaaaatcatggaccgcttagtgtgcggtgatgtaggctacggaaaaacagagattgccatcagagctgcctttaaggctgtgcaggacagtaagcaggtcgtatttcttgtgccgacaactattcttgctcaacagcattacaatacatttgttgagcgaatgaaggactatccaattcgaattgaacttttatcacgctttcgcacgtcagcgcagatcaaggcatcacttgagcgcttaaaaaagggtcttgccgatattgtaataggaacgcatcgtgtgctgtcaaaggatgttgtattcaaagatctaggccttttgattattgatgaggaacagcgctttggtgtcacacacaaggaaaagattaagcagcttaaaaaagacgttgacgtgctgacactaacggcaacaccgattccgagaacacttcatatgagtatgataggcgtgcgcgatatgagtgtgttagaggaagcaccgtatgagagaagaccgattcagacatatgtaatggaaatgaattgggaaatggttcgcgaagcaataaacagagagcttgccagagacggacaggtttattatgtgtataatcgtgtcaaggatattgatcagattacggcacagatagcaaagcttgtgccagatgcaaatgttgcctttgcacatggtcaaatgtcagagcgtcagctagaacaaatcatgatggactttgttaacggtgatatagacgtgcttgtttccacaactattatagagacaggcttaaacattccaaacgtaaatactattatcatccacgattctgaccgctacggacttgcacagctgtatcagctaagaggacgtgtaggccgttcaaaccgcactgcctatgcttttataatgtatcagcgaaacaagattttaaaagaagaggctgaaaagcgtcttcaggcaattcgtgagtatactgatcttggttcaggtattaagatagccatgcgtgatctggaaattcgaggcgctggaaatttgcttggcagtgagcagcacgggcatatggaagcagttggctatgatttgtactgcaagatgttaaatatggctgtcaaaaaagaaaagggtgagcttgagatggaggaaacctttgaaacaacggtggacattccaatcagcgcttacattccagacagctatatacgaaacgaagaagacaggatggaaatctacaagcgtattgcagcagtcgagacagaggaagagtcaatggatatgatcgacgagcttatcgaccgttttggaagtgttccaaagccagtcaccaacttgcttgaggtgtcaatccttcgtgcgtatgcgcattctctctatattaaagaaatcaagtcctcgtcaacagagattcgcctgttcatgcatccaagagcaaaatttgacacgatgcgtgtgccggatctgatacagtcttaccgaggtgcacttcgtctgcttgacaaagacaatccttatttcttattgagggcaggagatggcgcagtcaaagaaaaaacgctgacattgaaaacattgaaaaaactgttaagcgatataaaaacgttgattgtttcataa

SEQ ID NO: 2453 - DNA, 3171 bp, unclassified Clostridiales
atgagaaaggagaaaactatgttgtacaataaggttcctacagacttaaagtttgtggagagggagaaggaagtttccaaattctggaaagagcatcatatcttcgaaaagagtatcgaggagagagagggctgccctgagtacatgttttatgacggtccgccgacagcaaacggcaagccgcatgttggacacgtggtaacccgtgcgatcaaggatatgatccctcgttacagaaccatgaaaggatatcaggtaccgagaaaggccggttgggatacacacggacttccggttgagcttgaagtagagaaggagcttggtcttgatggaaaagagcagatcgagcagtatggagttgagccatttatcgaacgctgtaaggcaaatgtctggaaatataagggtatgtgggaagaattttccgagaccgttggtttctgggctgatatggaaaatccatatgtaacttattacgatgatttcattgagtctgaatggtgggcattaaagacaatctgggacaaaggactgctctacaagggctttaagatcgttccgtactgcccaagatgtggaactccgctttcaagtcatgaggttgcacagggctataaggatgtcaaagagcgttctgcaattgtacgtttcaaggtaaagggtgaggatgcatacttcttagcatggacaactacaccatggacactgccgtcaaacgttgcactttgtgtaaatccagaggatacctactgcaaggtaaaggcagcagatggctatacctattacatggcagaggcacttcttgagaacgtacttggccgtcttaagacagaggatgcgccggcatatgagattcttgagacttataaaggaaaggatcttgagtacaaggagtacgagccgctgtttaagtgttctggagatgttgctgcaaagcagaataagaagggcttctttgtgacatgtgacagctatgttactatgagtgatggtactggtattgttcacattgcacctgcatttggtgaagacgatgcaaaggtcggcagaaagtatgatcttccgttcgtacagttagtagacagcaagggtgagatgactaaagagactccgtatgcaggactttttgtcaagaaggcagacccggaagtattaaaggatctggaagcagaaggcaagctctttgcagcaccgaagtttgagcacagctatcctcattgctggagatgtaatactccgcttatctactatgcaagagagtcttggttcatcaagatgacagctgtaaaggatcatctgattgcaaacaacaacaccatcaactggattccggagagcatcggtaagggtcgttttggcgattggctgacaaacgttcaggactggggacttagccgtaaccgttattggggaacaccactgaatatctggcagtgttcatgcggtcatatgcatgctatcggaagcaaggaagaattaaagaagatgtcaccagactgtccggataatattgagcttcatcgtccattcatcgatcaggttcatgttacctgcccgaagtgtggaaagccgatgacaagagtaccagaagtaatcgactgctggtttgactcaggatctatgccatttgcacagtatcattatccatttgagaataaggaagtcttcgagaagaatttcccagctgactttatcagtgaggcagtagaccagacaagaggatggttctattccctgcttgcaatctcaactcttttatttgacaaagcaccttataagaacgttatcgttcttggccatattcaggataaagacggtcagaagatgagtaagtccaagggcaacgccgttgacccaatggatgcactgcgccagcacggagcagatgcaatccgctggtatttctactccaattccgcaccgtggcttccgaaccgtttccacgatgatgcagtaaaggaaggccgcagtaagttcatgggtactctgtggaacacctacgctttctacgtactgtatgcaaacatcgacaacttcaatccgatggagcacacattagattatgagaagctttccgttatggataagtggattttgtctaagttaaactctacgattcagacatgcgacagcagcctggaaaactacaagattccagagactgcaaaggcacttcaggaatttgttgatgatttgagcaactggtatgtacgccgcagccgtgagcgctactgggcaaagggaatggagcaggataaggtgaatgcctatatgacgctgtatacatgtctgactgaaattgcaaaggcagcagcgccgatgattccgtttatgacagaggagatctatcagaatatcgttgtaaaggtagatccatccgcaccggagagcatccatctgtgtgattatccaaaggcaaatgaggcacatgtagacaaggaacttgaagcagacatggatcttgttttaaaggttgttgttcttggccgcgcatgccgaaacagtggaaatatgaagaaccgtcagccgcttgcaaacatgtttgtaaaggcaccatttacattaaacgagttctttaaggatatcattgcagacgagttaaatattaaggcggttacatttacagacgatgtacgttcctttactacctacacctttaagccgcagcttcgtacagtaggtccgaagtacggaaagcttcttggaaagatccgtaccgccctttcttctgtagacggcaatgccactatggatgagttaaaggcaaatggttctgttacctttgattttgatggcgagaaggttgttcttactgaggaagaccttttgatcgatatgacgcagaaagaaggctatgtaacagagagcaatcaggatgttacagtagtattagactgcaacttaacaccagagctgcttgaagaaggctttgtaagagagatcatcagtaagatccagacgatgcgtaaggaagcaggattcgaggtaacggatcacatcacagtcggctacaaggacaatgcaaagattgagaccatcttcagcaagtatgcagatgagatttgtgcagatgtacttgcagataagctgacagatagtgagatcagcggctacaccaaggagtggagcatcaacggcgagactgttgtactcactgtcagcaaggaataa

SEQ ID NO: 2454 - DNA, 2583 bp, unclassified Clostridiales
atgctgttagcattagagctgtctttgaaggaaaaaattgaaaagcagtatgaagagtggatggcttgctgtccgaacaaaaagagtgagatagatgcgtggattaaaagcgcagatgaggacgaggcagtctgcatgaagtacctttacgcatatatgcatccgtgtgatattgtatcttatgatgtagaagtgattgcatcctatgtaaaggcaacactcgatatgtatgcgaatgttccatatgcaaaacaggtgccggcagagctgttctttacatatgtactgtgcgtgcgtgttaacaacgaggatcttgataagagccgtgagtggatttacagacagcttgttgatcgcgttaaggataaaaagacaatggtagaggccgcacttgaggttaactactggtgctatgaaaaggcaacctatattccgtctgatgatcgtactctggcgccatttggtatgtgcaattccgcacgcggacgatgtggtgaggaatcaacacttgctgtatctgctatgagaagtgttggtattccagcaagacagtgttatgttccgcgttgggcacactgtgatgacaaccatgcatgggttgaggtgtgggcagatggcgattggcattatcttggagcatgtgagccagaaccagtacttgataagggttggtttactgcagctgcatcaaaggcaatgcttgttcatgcaaaggcattttcagacctggaaagctctgcagaaatagcctacaagacaccgctttatgcgctgatgaatgtaacagagcgctatgcagattgtgcgaagctgactgtaacagtaactgatcatggcgtaccagtgcagaatgtttctgttttattctgtcttgtcaattatagtgagcttttcccacttcataaagaaaaaacagcatctgatggcagtgtgtcctttatgacaggtaagggtgatctgtatgtatgcaccgtttacaatggaaaatatcttggtcagaaaattgatatgagagagcagcagtctgttgtattaaagatggagcaggcagcagatccagagaagatggaaggcataatcgaggagcgctttgatttgaacccgccgattgaggctatgccaaagagtactggtgcacagatgaagagtgtgcatgaggctcgccttgctgagtgtgagaagattcgcgctgattatgaggaaggctttgtaaaggaagataaagacagcagtgatccgtggaatcgctattttgtcaatgcaagaggaaacagacaggagcttgaaaaattcagacagatgactgagtttacagatgaggataagcgtctgatgcttgatacgcttcgtgataaggattttcttgatactacagcagaggtacttgcatcatatttgcgtgctgcattgccatataagaacaatttctgtacagagctttaccagaaatatttgcttgcaccgcgtgctggtcatgaaaagcttatgggaagcagaagccgtattgtttctctgttatctgaaaaaaaggtattcccacaggatggcacattgactgcaaagatggtatgggagtatgtaaatcatggcttaaatacagtgccggattatggaacaggaaactggccggcagaggcagatggctgtataaagtgtgagatcattaccgaggtttcaaagagagttgtctttgttgagatttgccgtgctattggtattttggcacgcttaaatccagtaacaggaaaggcagagggcgtttgcgaaaagaacggtgagatttgctttgagtctatggaaaaggaagttcaaaagatagatgagccagagaagcaggtaacactgactttagtaaataaatctgatcgtaagcttgagtactggcttcatatgacgattgcccgttttgaaaatgatgtttatcagacgcaaaactatgatgatcttgcaattgagccgggagaagaaaaggaactttccttggcgaaaggtgcttaccgcatcatcaccacacagcgtcagattgatggtggcgttagctgtatcgcaagcagctttgttatgagcgaagatcgtgtatttgagcttcgtcaggcaccagcaaagattgccgaaaagtgtcatgaggcagagcttagtgatgcgacagtacagcaggtgacagcagagggaaagatggttggcgatcatgttttgatgacttcactttatcagggacaaaaatcaattcttgtttttgcagatccaggaaaagagccgacagagcatctgttccaagagatccttgagtgtaaggaagcttacaagaggcagggatacagagttataattgcacttgagaatacggatgttttaaagaacgagacattacagcgtgtacttaatgcagggttaaatcttgtatgcgtgacagtaaagaatgatgcatatttgtatcagctgcatgaggcacttcacgtcggagatgagcgtcttccatatgctgttgcagtgaatacagaaggcaagggactttttgcattcgcaaactataacattcgtacagcatggacattgatggaaatccttgatgcaaagggctaa

SEQ ID NO: 2455 - DNA, 4518 bp, unclassified Clostridiales
atggcaaagcgcttttttgaaacatttccagcgcttatcctagaagatgagctgaaggatctgttcgaatttgcagaagtaactgcattaaaatataatcgtgacaggacggcgattcatgtctatctgctttgtcgccgtctgatttcaaagccgcagatttatgcggtggaatctaaaattgaaaagcagatgtttcctgatggtgatatgaagattcgtatatttgaatctttttcactgtcagaacaatacacaccgtcatatcttgttgatgtctataaggacagtttatttgcagaaattaagcgtcgaagtgatctggattatcatattttgatgcgcgctgactggaaggtagctgatgatgattcacttttgcttacattagaggatagtctttgggctagaaatcgtgctggcgagctgcgtgaatggattcagatggttttttatgaccgctgtgcaatatcaattcctgtagcagtatcatttaaagagcgtgatacaacagcaattgaggaagaaaaaaagcgcgcagaggcacaggctatcgcacgtatcatgaaggccaacagcgtggcttccaaagagaaagaggatgaatttattgatacagcctctgctgatacgaaaaaaggcagtgaaaaaactactcttagaaaaggagatccatcaaaagttgcaaaatcagctggcgaaaaaaacgttcagacaccgcgcgaaattccaggcggcaattttcaaaaatcatcctataacaagggtaataaaggcggatacagcgccaagcgtcctcttcgttcagacgatccaaacatggtatatggacgcaattttgaggatgtcacaccaatgaaaattgttgagattcaggaggagatcggagaagttgtcataaatggaaagattattgctgtaactgagcgtgagcttagaaatggcgagaaaactatcatttcctttgctgtaactgattacacagatacgatcatggcaaaaatctttgttccaaatgagtttttagccgaattaaaaaaggatgtggctgttggcaaggctgtaactgttaagggcatcgccatgatggataagtttgaccatgaagtaacgatttcctctgtatcaggtataaagcgtgcggaatggaaggaagaaaaacgcgaagatcacgctcttgtaaaacgagttgaacttcactgccatacaaagtcctcagagatggatgctgtatctgatgcgcaagcgcttgtaaaaacagcaaagggctggggacacactgctcttgccataacagatcatggctgtgcgtatgctttcccggaagctgcacatgcattgtcaaagggtgatgattttaagctgatctttggctgcgagggatacttagtcgatgacttaaaggaaatcgttgtaaatagtaacggtgcttctcttgatgcttcatatgttgtatttgatattgagacaacaggatttcatccatctaaaaataaaatcattgagattggtgctgtaaaggtgataaatggtgagattacagatcgcttttctgagttcatcaatccgcgtgttcctattccgtttacgattgaacgactaaccggaatcaatgatgctatggtttgtgatgcaccaggcgtagaggaaattcttcctaaatttttgagcttttgcgaaggctgtgtccttgtagcgcataatgcgtcctttgatacaagttttattcgctataatgcagagcagcttggcattgaatttcctccaacttacgttgatacagttggactggcacgttttcttctgccgcatcttggacgttttaagcttgatactgttgcaaaagagcttcatgtttcacttgagaatcatcatagggcagtagatgatgccggggcaacagcagaaatttttgtcaagtttcttccgatgcttaagaagaaaggctttgaaacacttgatgatattgtagaaaaggctgttatgacaccagaggcaattatgcgaatgcctacgtatcacatcatattgcttgcagcgaatgaagtaggccgaataaatctgtatcgtctgatctcaatggcacatgttaaatattttgccagaagaccgagattcccacgctcagaaattatgaaatacagagagggactgattattggatcggcgtgtgaggcaggcgagctgtttcgtgcaatcacaggaggagagagcgatgatgaaattgcaaaaattgtctccttttatgattatctggaaattcagcctacaggaaacaatgagtttatgctgcgtgaagaggattctccttataagacaagagaagatcttgaggcgcttaataaaaagattgttcagcttggcgagctttacgataaacctgtctgcgcaacatgcgatgtgcattttttaaatccagaggatgaggtttaccgccgtattattatgagcggtaaaggctttaaggatgctgatttccaaccgccgctttattacagaacaacagaagaaatgctaaaggaatttgaatatctgggaagtgacaaggcatatgaggtagttgtcacaaatacgaatctgattgcagatcgtattgatcatctggcacctgtacggcctgataaatgtccgcctgttattgaaaattcagatatagaccttagaaatatgtgttatgaaaaggcacattcaatgtatggcgatccgctgccgccaatagtagaagagcgcttagagcatgagcttcactcaatcatttcaaatggctttgccgttatgtatctgattgccgttaagcttgttcataagtcaaacgaagacggttacatggtaggttcacgtggttctgtcggatcatcatttgttgcaactatgtctggaattacagaggtaaacccattaagtccacattattactgcaagaaatgtcattacagtgattttgattcggaggaagttaaaaagtttggtggtggtgcaggctgcgatatgccagataaaatttgtcctgtatgcggtgaaaagcttgcaaaggatggctatgatatcccattcgagacattcctaggcttttatggtgataaggagcctgatattgacttaaacttctctggtgaataccagagtaaggctcatgcctatacagaggttatttttggcgccggacaaacctttagagccggcactgtaggtacactggcagaaaaaacagcatttggctacgtgaagaattattatgaagaacataaccaacataagcgagagtgcgaaattaaccgccttgtcactggctgtactggcgtaaaacgaacatcagggcagcatcccggcggaataattgtacttccaatcggtgaagatattaactccttcacaccagtacagcatccggcaaatgatatgacgaccagcacagtaacaacacactttgattaccattcaattgatcataacttgttaaagcttgacatacttggccatgatgatcctaccatgatccgtatgcttgaagatttaacaggaattgatgcaagagaaattccgctcgacagtccagaggtaatgtcattatttaaggacacatctgcgcttggaataaagccagaggatataggtggctgtaagcttggtgcacttggtcttccggagtttggcactgactttgctatgggcatgttaattgaaacacagccgcagcatttctcagatttagttcgtattgcgggtttgtcacatggtacagatgtatggcttggaaatgcccagacacttctgcaggagaaaaaggcgaccatttcaactgctatatgtacgcgagatgatatcatggtttacttaatcagcaagggcattgaaaaaggtctttcgtttaagatcatggaggcagttcgaaaaggaaagggtcttcagccagaatgggagcagactatggttgagcatgatgtgccagactggtatatatggtcttgtaaaaagattaaatacatgttccctaaggcacatgccgcagcttatgttatgatgatgtggcgaattgcatactgcaaaatcttttatccgctggcattttatgctgcctactttagtatacgtgccactgccttttcatatgaattgatgtgtcagggcaaagaagcactagaacgtcatatggctgattatgaaagccgaatggacacgctttcaccaaaggagaaggattcctatcacgatatgcgtattgttcaggaaatgtatgtaagaggctttgaatttacaccaattgacttgtttaaggtacaggcaacaagattccagattgttgatggaaagctaatgccatcattaagctctatagaaggtcttggaaataaggcagcagaatccattgtagaagcagcactcggaggggcgttcctttcaagacaagattttcgagagcgcgccaaagtgggacagacagttagtgataagcttttggagcttggaattttaagcgatattccagagtccaatcagctgtcgctctttgacttttaa

SEQ ID NO: 2456 - DNA, 3699 bp, unclassified Clostridiales
atgggtattggtatggatgcatatgagcagatgggaagagagctttttgaaaaaagtcagggtgcaccgatattgctgattggtatgggcggtgtcggaggacgcattgtggcacagatagataaaatgttagcaaaggattcaccaaggcgcgataaggtggcgattcttgcgattgacacaaatgtaaaggatcttcgaaagctgcgtgagcagggaatagagacaattcagatcagcgatgagcgtctggttcgtcaatatttgaaggatcatcctcagtatatgagttggtttccgaataacatttttttgaataacagaggaatgcttgagggcgccggacagattagagcaatatctagactcgcagcactagctgctgaggaagaaggaaagtttcgcccgattgaagaggcggtcagaaaaattgcagctgtcacgggaagtggattaaaggaaaatatcatgacgatggttgtaggatcaatatgcggcggtacaggagcaggcatgtttattcagatcccattttatgttaaaaaaatcattcaaaaggtgcttgcaattccaaatgtgatggttagaggcatgtttttgggacctgatattatggctcctattcagccgggagatttaaatcgtcaggctgtatatgttaatgcatatgcctgcctaaaagaattaaatgcgttttatttattgcagagacgtgatgcttcatcgtcacttcttcgcatggaatattatgattacggagaaaatgaggatcttgaggcagaggtgatggagtcgcgccagatgtatcaggcaattgcaaaggatctttcgtcaaagggcgtggctgtattagatgaagaaataccagaggaggtacaggaggaatatctaaagcgaaacggaactattccatatgatcatctgtttttatttgacagcagctttaatggcggcacgattggacaaaagcagctggcagaggtagagcgcatgatcgcgtctatggcatatgtgcatctgcttacagatgtaggagaaaatgcgctgtctgttgaggataactttattctttccacgattggaagcaatggtatggctcgctttggaagcgcaggtctttgcaagattatttatccaggcgagcagatcatgcagtattgctcaatgagatggattacagagcttgttgattcttattggatgcgtattgataagcgctttgaagaagaacttattctggcaagggaagaacaggcaatgaatccgcgtattcagctgcctggaattatcgagcgttatcaggagatttttttggaggagacatcaggagaacatgcaagtatggcatccttatatgctcaggttttcatgcagagtgatgatggaacagatttttcgcttgcagatcgctttttggagcagattgaggagatgatagaggatgcaacttcaaaggaaagcctgcagcgccttggagagtcctgtatggatatttctattgatcaatggattcagtcaccggaagcagcaagacagggagtagcaacaaataagcagtcaattagaaattatagggctgctgtcatgaaggttattgatgatacgaaatattcacttccaaaccaaatgattccggcaacgcttagcgcaatgattcagatgagtgaccgtgacagctgtatttctcagattcttggacgtgtgcatccgattgcggctcgttatcttttgtatgcgattttagagcagactgcagcacgggcaagagaggcaaatgaggattgctttggacttgagcttgatctgataaacacggcagattatgatataagcggcaaaaatccagggcttccgatagaggctattcttggaaaaaggatgaatcgcaaacaaatgcgtcaggtacttgaggtgtatgaggatgcatctggaagaacagctgcaaatttgactgcatatttgtcggcacagctgcgcgcaaatgtttatgagacgctgcaaaaacgtcttgaaaagctgtgtgatctgtatagacgttttttcaatgtattagaaagctctacggaggatcttagaagacagattcgtgagctcaaaacgatgggaagacagtcatctgtaggagaacaatatatttgctgcagtgaatcatgtctggaagcattatatgaaagatttgctcttatgtgtcagaatacaggtgccgagcttccgcaggagtcggcaagaatgattcttcgaaatatttacggagagatggagctggaattaaagaaaaacaatatggaagaccgccgcagagaagatatggcttataataaccgcatgaggacgatatttaatcaggcagtggcagaggtgatgcagcaaaaagcgcgtgagcaggcttcttctgtggtggaaataagtatatatgatgcatttgcacttgagatgcagacagagcttggcattgtgcgtgagcatgatcgtgatcgttatgatgcaatgctggatgcatggattaaaagcaaggtatcagctgccatgacaatggcgcagccttggatcggcatatgcaatacagtgggtgctacaactatgtctgtttatcttgcaatgcatcctgacaatgctgttagaatggataatacaccatctgtcgaggcgacagcagcgcgttatttaaaagaacgcacaacaccacagggtcatgcagttactgtgctgatccatgataatttccgtcagaatgaattgatttgctataaggcacgctacaacttgctcattgaaaatcttgataaattcaaacgggcaggagaggcacatcgctactatgagcagcgaatcaaccgtattggtcagctgccaggtacgtcaagagagtcagagatcattactgtaatcaatcctcatttaaataaatattggtgcgaggagggctttcttccaagtatttatccatcgcagcgaattgtggatgaaaaaaataacatgcgagcctttttctatgcactaacacttgaaaagccttgctgtgtgcgtttgaaaaatactaagggaaaaatatcatggtggtttcttcgtggtatggatacgatccgcgtcaaggcagcaggtgtcccaattggaagctcttatgcagatctgtatgaagcgatgaaatttaacagggatatgaaatatacacttttatattatggaaaaaatcatttgcatcgtataaaggctcaaagcatgcaggatcagctagagcaggaaatttacacgcagccgataattgccgatatgattcagcaggagaaggagccagacgatgaaaacatgcttgatatttttgaaaagatgtcaagaagtatggaaagtgcacagtttaatcgtttgttagagggattggcacagtttattcgtgagtattgtgagtacatgtttgataaggacgaggtcaaggtaatatacgcatgccgaaatataagaaatgctattgcaacattctcaaagctttatcaaagaagcaaacaggaaaagcttacatacagagaagaacatttattgtcagttttccttgagctttatgaagaagatgacatggcagattcaaacgcaggattaagcaaagtcctttatgatactgatgatccggatgcagaagctgcagtcgcaaaagatgagccaggtgagaaaatttttacagatgattatgatgatcttgcctaa

SEQ ID NO: 2457 - DNA, 3786 bp, unclassified Clostridiales
gtgaagggtaattacaaatcaaaggagaatgatatgagcgtcagaagaatcttcgcggagaagaaggaaccttatgcagtaaaagcacaggagcttatggaagagatgagcagctatcttgacattcacgatgccaagaaggtgcgtgtgctgatccgttatgatgttgaaaacctttcggatgagacttatgaaaagagtaagggaactattttttcggagccgccggtcgatgatctttatgagggcaccttccctcatgagaaggatgatattattttttcagtagagtatcttccgggacagtttgatcagagagcagactcggcagagcagtgtgtaaagctgttaaaggaagatgaacagccgattatccgttcagcaaccacatatgtgatcagcggtgcacttacaagtgaggaagttgctaagctgaagaatcactgtattaacccagttgattcaagagaagcatcggaggaaattccgcagacactgaacatggtacatccagagccagaagatgtaaaaattctggaaggcttttccaagatgaaagagaaggatctgaaggcgctctatgattcctttggtcttgctatgacctttaaggatttccttcacatccagaagtatttccacgatgaggaaaagcgtgatccgtccatgactgaaattcgtgtacttgatacatactggtctgatcattgccgtcatacaaccttccagacagagttaaagaacgttacatttgaggaaggatattatcgtccggtaatcgagaagacatacgatgagtatgagactgctcataaaacattgtttgaaggcagaaatgacaaatttatcagtctgatggatctggctcttatgggtatgcgtcagttgaagaagcagggaaagcttcaggatcaggaagaaagtgatgagatcaatgcatgttctatcgtagtacctattaaggtagacggcaaggaagaagagtggctgatcaactttaagaatgagacacataaccatcctactgagattgagccatttggaggcgctgcaacatgtcttggtggtgcaatccgtgacccgctgtcaggtcgtacctatgtttatcaggcaatgcgtgtgactggtgctgcagacccgacacgtcctctttctgagacacttcctggaaaacttcctcagaagaagcttgttcgtacagcagcagctggttatagctcttatggaaatcagattggtcttgcaactggttatgtaaaggaaatttatcatccaaattatgtggcaaagcgtatggagatcggtgctgttatgggtgctgctccaagacgtgcagtaatccgtaaaaattctgatccaggcgatatcattattctgcttggcggacgtacaggaagagatggctgcggtggtgcaactggttcttctaaggctcacacacagtcttctatcgaaacatgtggtgcagaggttcaaaagggtaatgcaccgactgagagaaagttacaaagactgttccgtcgtgaggaagtcagccatctgattaagaaatgtaacgactttggtgccggcggtgtatctgtagcaattggagagctggcagatggtcttgttgttgagcttgataaggttccaaagaagtatgcaggtcttgacggcacagagattgcgatttctgagtctcaggagcgtatggcagttgtagtagatccaaaggatgcagaccagtttttagcttatgcagctgaggagaatctggaggcaacaaaggttgcagttgtgagtgaagatcctagacttgttcttcgctggagaggaaaagaaattgttaatattagccgtgcattccttgatacaaacggtgctcatcaggagacagatgttactgtaagtatgccaaagaaggaagaaagcttcttcgcatcaaaggaagttactgatgtaaaggaaaaatggctttctatgcttgctgatttaaatgtttgctcacagaagggtcttgttgagatgttcgacagctccatcggtgcaggaagcgttgtaatgccgtatggtggaaagaatcagctgactgaggttcagacaatggtagcaaaggttcctgtagcaaagggaaatactgatgctgttaccatgatgagctatggttttaatccatatctgtcctcatggagtccatatcatggtgctgtttatgccgtaacagagtctattgctaaaattacggcagccggcggtgactacagtaagattcgtatgacattccaggagtacttccgcagaatgacagaggattctcatacatggggacttccgtttgcttccttgcttggtgcatatgcagcacagatgggatttggtcttccgtcaattggtggaaaggattccatgtcaggaagttttgatgagttaaatgtaccgccaacacttgtttcctttgcagttgatgtggcatctgaaaatgatgttgtaacaccagaatttaagaaggcaggaaataagcttgttctgtttgctattgagaaggatgaatatgaccttccaaattatgagcaggtgaagaaactgtacggtcagattcacgaggctgttcgtaatggtcagatcgtatcctcctatgcaattggcgcaggcggtatcgcagaggcagtcagtaagatggcatttggtaatggccttggtgcagttatcaatgcacagcttgataagaatctcctctttgctccattatacggaaatattctcgcagaagttccggcagaatgcatcgcagatttagaggttccatgtgaggttatcggtgaagtaagtgcagagccaaccttcacttatggtgaaattgtaatttccatggatgaggctgtaaagagttggaagtctactcttgagaaggtattcccgtctgtatctggaaagacacagccaaaggttgatacaggtatctacaaggcagattcaatctatgtatgcaagaataaggttgcaaagccaaaggtatttattccagtattcccaggaacaaactgtgagtatgacagcgcaaaggcatttgagcgcgcaggcgcagaggctattgttaaggttgttcgcaaccagacagcagaagaaattcgtgagtctgttgatatctttacaaaggcaatccgcgagtctcagatcatcatgttcccaggcggattctcagcaggtgatgagccagatggttctgcaaagttctttgcaacagcatttagaaacgagaagctcaaagaagcagttatggatctgttaaacaacagagatggtcttgtacttggtatctgtaacggcttccagacacttgtaaagttaggacttgttccgtatggtgagattattgacagccagctgtctgattctccgacactgacaacaaacaccattggacgtcatgtttccaagatggcatacttaaaggtagtatccaataagtctccatggctggcacaggcaacactcggcggtgtttactgcaacccggtttctcacggcgagggacgtttcgtagcaagcaaggagtggcttgataagctgttcgcaaacggacaggttgcaactcagtatgttgattacaatggcaatcttgcacaggacgaagagtggaatatgaacggttcctatgcagcaatcgaaggtatcacaagcccagatggacgtgtatatggaaagatggcacattcagagcgtatcggagattctgtagcaatcaacatctatggtgagcaggatctgaagctgtttgagtcaggtgttaagtactttaagtaa

SEQ ID NO: 2458 - DNA, 2448 bp, unclassified Clostridiales
atgagtcaacttactatttcaacgcaggaaaaacgttttcctgttgctccagatctatacggcttattttttgaagatatcagccatgctggtgacggcggcttgtatccagagatgcttcgtaatcgttcctttgaggattctctgcttcccgatggctgtatcacaaacgataatggcaaaacatttacttctccaacaggatggattgatgaattcaacaatggcgaaggaatgaatgactggatcgcatcacaaaaaattgcaccaaccacaattcctgcctggtattccgaaaatgcagacatgcagcttaataaagataatacactcaatgataatcggcgcgtttctcttcaagttgattttgaggaaaatggcaaaatctataacatcggatataatggcattaatcaagaaaaaggagatacatataatttctatctatttgcaaaatcagaacaaacactgcatctgacggtatccattcaaataaataatcaaacatcctgcagcagcgatatcatcataaacgatgctaattggaaacgctatgatgcacaatttctggccactgaaacagcaagaaatgctactttctccattcaatgtcaggaaaaaggaaccctttaccttggcttttgttctcttatgccttcagaaacatttcacggtcacggacttcgcaaggatcttgcagaaaagcttgaacaaatgcatccttcattcttgcgttttccaggcggctgcatcgtagaaggctttacacttgaaacagctatgtttttctgtaatactgtcggtcccgtttgggaacgtccaagccactggcttctttggcactatcgaactacaaatggtctgggattccatgagtatctgcagttatgtgaggatttaaagctttctgctctgtatgtgtgcaactgtggtatgacttgtcagggacgcggtccttattatttcaacgaagctcaaatgcagtttgctatcaacgataccttaaatgccttagaatatgcacttggttcaagccaaacacattggggcagtctgcgtgcaaaaatgggtcatccagaaccgttttcccttaaatatctagagattggcaatgaaaatagtggtcctgaatatgaggcttgctttaatcgcattcgagaagctgtgcttgaacgctatcctcagatcattattgtctccaacacaagaagcgaaacaataaaaacagatattgtagatgatcattattacaatatgcctgaattttttgcagaaaatattgatatttatgatgactacagccgcaagaatcccaacatttttgtcggtgaatttgcagtaaaccaaacttatgagggacagctgcgcgctgcaatctcagaagctatgtttatggttggttttgaacgaaatcaggatgttgtaaagctttgttcttatgctccactattttctcacgttcattaccaatcctggtatccaaatctcataatgtttgataatagcagaagctatgttattccaagctactattgtttcaaactatttggtgcgaaccgcggtgacatggtagtttcctccaaagaatcctgcgaaaaaatttatctatccctgcatggtcttcctgtcatcaacggtgattgtggattaacctggaaaaatgctgttttcaatagtatacctgtttttccaacaaaaagcctgcatggaaaagccatacaggacaatgattcatatgttttacaggaaaatgatgccgatgaatttactaatcagtcaattcgaagtcaaattttacctggcattgctctaggtaatgatgtagaaagccgcgaaggcagctttactgttcaaattttggctgaaaaaggaaaacgaatcggtgttggtatgttgtgttcaccaaagccattcagctattatgaccgaactgatccgaatccaaaggatccatggatgctttttaatctagagcctctgcgctggattgttgaaggcaatactgctgctctctatcgcggcggcatttcccttacgcaatattcagagccaaaacaaatttcacttcgctatggagaatataatgaatttcactatgagcttacaaaaactgcagtcagtctatatctaaatggtaaacttatcgatactgttgaactgccgcattatcaatctatgtgttctgtcacgactgatactgacgatagtgtaataataaaaattgtcaacttctccgaaacagatgatccagtctgcatttcaatagattgtgatgtaaaatcagagtatgaggtttcgcagctcactggaaaagctgattttgaaaactcccttgacaatccagaccaagttcatgatacaacaacaatgttaactggtgctggcagatgttttacatttactgccccaggtctttccgtcaatgtattaaaattaaagaaaaaataa

SEQ ID NO: 2459 - DNA, 2106 bp, unclassified Clostridiales
atgagcggcagaattacagagttatttaacaacaatgtttttacagatgctgagatgaaggctcgtcttccgaagaaggtttataatgaagtgaaggcgtgcaagctggataagggatctgcagacatcgttgcacaggcagtaagagactgggcaattgagaaaggtgcaacacattttacacatgtatttgaaccactgacaatgcttactgcagagaagcatgactccttcgtttcgcttccagatgaagatggtaaggtcatgatggattttaccggaaaagaattgtgtgagtccgagccagatggttcatccttcccgtcaggtggtattcgtgatacctctcgcgcaagatcttacacttcatgggatatgacttcaccgatttacgtaaaggaggatgcaattggaaccattctttgtatcccggcagcattctgctcatacacaggtgaagcacttgatgcaaagacaccgcttcttcgttctatggacgcagtaagtgagcagggtgtcagacttcttcgtctgttaggaaacactacatctacaaaggtgactgcaggtgttggacctgagcaggagtatttcattgtagacagagataaatatttacagagagatgaccttgtatttacaggtcgtacactgtttggcgcaccggctccaaagggacaggagctcgatgatcagtattttggtgtaattccggagcgtgttggttcctttatgaaggagctaaacgaagagctgtggagatttggtatcactgcaaagacacagcataacgaggttgcgccaggacagcatgaggttgctccgattttctctgtgacaaacgttgcagcagacagcaacctgcttttaatggataccttaaagaaggttgcaacacgtcacggtcttgtatgtttgcttcatgagaagccatttgcaggcgtaaatggttctggtaagcacaacaactggtctctttccacagatgatggtattaatctgtttaagccaagcaagaagccagagactgatactcgcttccagttagttgttggctgcgttatgaaggcagtgaaaaagcatgcacttcttcttcgtaccgctgcttctaacccaggaaatgatcatcgtttgggtgcaaatgaggcaccgccagcaattatttctatcttcttaggtgatcagattggtggtgtagttgatcagattatcgagaagggatatgcagattcatctattccagctggaatgcttgatcttggtgtaaaggagtgcccggctgttgataaggatccgaccgaccgtaaccgtacatcaccatttgcatttaccggaaaccgtttcgagtttagaatggttgcttcatcctgcaacgttgcagagccaaacattgtattaaatgcaatgatggcagaagcattctctgatgcagcagatgcaattgaggcaaagcttagagaaggtaagcacacagatgttgctgttcgcgaagtgactgcagagtttatccgtgagaacaaggatatctactttaacggaaacggatatactgacgagtgggttgcagaggccgaaagacgtggtcttccaaatgtaaagacatgggttgactccatcaagtctgttacagagccaacgacagtagagatgtatgagaagttccacatcttaacaaagagagagcttgaggctcgtgcagaagtcttctatgagacatacagcaagactttaaatattgaagcaggtacaatgattgatatggtaacaaagaagatcattccggctgttatcaagtatgagaacaatctggctgcatctgtaaatactattaagtctgcatacgcagcagcaaacatctccactcaggagggtatgcttcatgagattgccgagcttcttggtgaaacatataaggcattaaagaagttaagtgatgttcacgcaaaggctgttgctatggaaggaaaagagcaggcattctattataaggatgttgtaaaggaagcaatggatgagctacgtgcaccagttgataagcttgaggtattagtagagcgcaaggtatggccgatgccaacatatggcgatcttctgtttgaaatctaa

SEQ ID NO: 2460 - DNA, 2445 bp, unclassified Clostridiales
atgttagtaccattaagttggcttaaagaatatgtagatattgatgtaacaccgcaggagcttgaaaaaaagctgtttgacggcggatttgaggtagaggagctgtatcaggttggtcatgacatcgataagattgtagttggtcttgttgagacttgtgagccgattccggagacacatcttcatgtgtgtcaggttaatgcaggtgagtatggcactatgcagatttgctgcggcgctgacaatgtacaggcaggcggcaagtatccggtagcacttgttggtgcaactgtttatgcaacagcgaaggatcataagacaatcgaaggcgtgatgacaataaaaaagggtaagcttcgcggttttgagtcatacggtatgctttgctctggaacagagcttggcttaacagaggatctgtatccgggtgcaggctacaatggtttgttagagatgccggctgatgcacagcctggtgcagatgtaaaggctatcacaggtcttgatgactggatgtttgacatctcattaactgcaaacagaccggactgccagagcatcttaggaattgcaagagaggtttctgcaatgcttgagaagccattaaagatgccgtcaaccgattatacagagactgatgtaaagaaggatggctttaaggtaagtgttgaggcaccagatctttgcccgcgctacagtgcacactatgtatatgatgtaaagatgggtgagtctccatcatggatgaagcgccgtcttgcacttgttggtattggatcaatcagcaatatcgtagatatcacaaactatgtattaaaagagatcggacagccaatgcatgcatttgactgctcttatcttgagggtaacgagatttgcgtaagaagagcacatgagggtgagaagattgttacacttgatgagcaggagtacacaatgtcaccagctaatcttgttatctgtgacggcgtaaagccagttgctttagcaggtgttatgggcggtttaaattccgagattcgtgacacaacagaaagtgttatgtttgaggctgctaagtttgcaagagataatgtcagaaagactgcaagagcacttggaaagtcctctgattcaagttcaagatttgagaagggcgtggatgaatactcaactgttcttggtatgaagcgtgcacttcatttaatcgaggagcttggctgcggaaaggtttcttctactcatgtagatgttaatgttggaaacagcattgagcctcagccgatgcaggtaagcatccataaggtaaacagcgttcttggaattgaggttccggcagaggagattgtacgcctgatgaagaatttaaacttcaatccgacagttgacggtgatgtactgactcttcaggtaccagcttaccgtgaggatatgctgccagagggtgagaatgatgtagagcgttatccagatgtggcagaggaagtaatccgtatgtatggttatgaccatattaagtcaacatttatgccatctgcacaggtaacagcaggcggatataataaagagcagaagggcgagcttgcattaaagcgtactctttgtactatgggtgcatatgagtgtatgcattactcattcttctcaccgtctgatttggatcttttgaagttcccggctgatgcgaaggagcgtttcgcaattcagatcatgaatccaatcaatatcgatctgtcattaatgcgtactacacttgctgcatcaatgctcaatgctatttcaagaaatgaaaagcagggtattcttgacggaagactttttgaggttgcaaatatctttattccgaaaaatctgccgcttaccgagtatccggatgagagaaaaacactttgtgttggtaccttcggtgcaaaggaatccttctacacaatgaagggcattgcaaacggaatcgcagacagcttagatgttgcatttacttatgagccaattcagaaatcattcctgcatccgtatcaggcagtaaaggtattatgtgagggcgaagaaattggttacttcggtaaggttgcatacgatattcaggacaagttaagcatgcgtgcaagcgcatatgttatggagcttgatctggagattctgtctaagtggtatgataagaagagaaccttcattccgctgccaaagtttgcagaagagaagcgtgaccttgcattcgtaatggataaggcaatcacatgtggagagatcgaggactgcatccgcaaggaaaataagtatgtaaaggaaatcaagctgttcgatatctatgagggcggccagattccggaaggaaagaagagtatggcattctccatcacattcgttccaaaggatgaggcatttgacgatgcacgcgttcagaagtttgttgacaagatctgtgcaaagttaaatgaggagtatggcgtagagctgagagcgtaa

SEQ ID NO: 2461 - DNA, 4266 bp, unclassified Clostridiales
atgggtacatcaaataaaacatataatcgtctcggcattgatatcggttctacgactgtcaaggttgcaatcctcgacagcgaagacaagcttttattttccgattatcaacgccattttgcaaatattcaggaaacacttgccgaacttttaacaaaagcatatgacaaattaggtccaatggatctggcttcctccatcaccggttccggtggtctgacactcgcaaagcatcttgacatcccatttgtacaggaggttgttgctgttgccaccagtttaaaagactacgcgcctcagacagatgttgcgattgagcttggcggtgaggatgctaaaatcatctactttaccggcggtgtcgatcagcgtatgaacggtatctgcgctggaggtaccggttcttttattgaccagatggcttctcttttgcagacagatgcatctggcttaaatgagcttgcaaaaaattaccatgaaatttatcctatcgcggcacgctgcggcgtattcgcaaagacagatattcagcctctgatcaatgaaggtgctgccaaggaagatttggctgcctctatctttcaggctgttgttaatcagactatttcaggtcttgcctgtggtaaaccaatccgcggtaatgttgctttccttggtggtccgctccactttctggatcagttaaaagaagcttttatccgcacacttcatcttacagatgaacatattattgctccagagcactctcatttatttgccgcgattggtgctgcgatgaatgtaaaagtgggcactacagttacgccgattactcagatgattgaccgccttacaaaaggcataaagatgaattttgagatcaagcgtatggatcctttgtttgcttctgaaaaagaatatgaagatttcacagtgcgtcataaacagcacactgtaaagaagggaaatcttcgcgaataccacggcaaatgcttcttcggtgttgatgccggctccacaactacaaaggttgctcttgtcgctgaggatggatctcttttatattccttctacagcaataataatggaagcccgctctcaacaactgttcgcgcaatccgtgaaatttatgagcagatgcctgatgacgttacaattgcctacggatgttccactggctacggtgaagcacttattaaggcagcacttcagcttgatatgggtgaggttgagactgttgctcactactatgcggcatccttcttccagcctgatgttgactgtattcttgatatcggcggtcaggacatgaaatgcattaagatcaaaaatcataccgtcgacagcgttcagttaaatgaagcatgttcctctggctgcggctcattcatcgagacatttgcaaaatccttaaattatacagttgtcgattttgcaaaggctgcgctttttgctaaaaatcctaccgaccttggaactcgctgtacagtatttatgaattcaaacgtaaagcaggcacaaaaggaaggtgctactgttgccgatatctcagccggtcttgcatactccgttatcaaaaatgcgttatttaaggttataaaaatcaatgatgcttctgatcttggaaagcatgttgttgtgcagggcggtaccttctataatgatgctgttcttagaagctttgaaaagattgctggctgtgaagctgtccgtccagacattgctggaatcatgggtgcctttggtgctgctcttgttgcaagagaatattatcagtcacataaggaaccaaagacaagcatgctgtccatgaatgacattttgtctttaaaatatacaacacgtctgacacgctgccagggctgtactaaccactgtcttctgacaatcaaccgtttcagcaacggcagtcattacatatttggaaaccgctgtgagcgtggtcttggcaaggagaagaataaggaaaatattccaaacctttttgattacaagtatcatcgtatttttgattatgagccgcttgaagaaaaggatgcaaaacgcggaactgttggaattgcgcgtgtattaaacatgtatgagaatttcccgctgtgggcagttttctttaagaagcttggctaccgcgttgtactctctcctgattccaaccgttccatctatgagatgggtattgagtctatcccaagtgaatctgagtgttatcctgcaaagcttgctcatggtcatgttacatggctgcttcgcaacaatgtacactttatcttctacccttgtattccatatgagcgcgtagagtttgatgatgcgcagaaccactacaactgcccaatcgttacttcatatgcagaaaacatcaaaaacaatgttgaggagcttcgcagtcctgacgttacctttatgaatccatttttagctcttacaaacgaggagatcatgacaaagcgtctcgttgaggagtttggaaagcttggcattccagaggacgaaattcgtgaagccgctcacgccggctggcttgagatgcaaaaatgccgtgaagatatccagaaaaagggtgaggagactcttgaatatttaaagaagacaggaaaacgcggtattgttcttgctggtcgtccttatcatgtcgatcctgagatcaatcatggtattccggaattgatcacctcctatggtattgcagtattaacagaggattccatctctcatctggcaaaaatggacggtcgtctgattgtattaaaccagtggatgtatcactccagactttatgcagctgcacagtttgtgcgcacacaggaaaatcttgatctgatccagctaaattcctttggctgcggtcttgatgccgtaacaacagatcaggtcaatgatattttgaccggctcaggaaagatctatactgtccttaaaattgatgaagtaaataaccttggtgcagcacgtatacgtatccgctccctgctttctgcaatccgcgtccgcgagcaaaagcatattgagcgccatgttgtttcttctgcctataaccgtgttctcttcacaaaggaaatgaagaaaaactacaccattctttgtccgcagatgagtccgatccactttgatctgcttgaaactgcactcagaagttccggttataatgttgagatcatgaaggaaagccgcacagctgtcgatgttggtttgaaatatgtaaataatgatgcctgctatccgtcactgattgttgtcggccagatcatggatgctctgttatcaggccgctatgatcttaaccatgttgctatctttatgacgcagactggaggcggctgccgtgcaagtaattatgtcggctttatccgccgtgcactagaaaaggctggaatggctcagattcctgttgtctcacttaatttaagtaagcttgaggcaaatccgggtatgacctacactcctgctctcgccatccgtgctgtacaggctatcgtatatggcgatatcttcatgcgcaccgtatatcgtatgcgcccatatgagaaggttcctggttctgtcaatgcaatgcatgaaaaatggaaacgtatctgcaacaatgacttaaagcgtactcctagcatgacacgttttaaccacattattaaggatatgatccgcgactttgataatattccgatctatgaagataaagttattccaagagtcggaattgtcggtgagatcttagtaaagttccttccacaagcaaataatcatcttgttgaacttcttgagcgcgagggcgctgaggctgttatgccagatatgcttgacttcttcctgtactgcttctacaacagcaactttaaggctgaaaaacttggcacaagcagtgctgctgccagaatgtgcaatatcggcattaccgctcttgaatatatgagaaaagcagcacgaaaggcatttgcccagagtaagcactttacaccgcctgctgacattcgtgatcttgcaaaatatgcagatccactcgtatcaatcggaaatcagacaggtgaaggttggtttttgacaggtgaaatcatggagctgattcacagcggcgtcaacaatgttgtctgcacacagccatttggctgcctgccaaaccatattgttggaaagggtgttattaaagagatcagacaccaatatccagaatctaatataatcgctgtcgattacgatccaggcgcttcagaagttaatcagctgaatcgtatcaagctgatgcttgcaactgcacagagtaatctggataaagatcaaaagaataagaaataa

SEQ ID NO: 2462 - DNA, 1926 bp, unclassified Clostridiales
atgatagaaaaaatgcaattcttaagcattacgggacccaaagatgatattgacagagcaattgaacagcatttgtcaaagtatgagtttcagttggaaagtacaatgacagagctttctgagacaactggacttaagccgttcattgagatcaatccgtaccgcgagaccttaaacaaagctacacagcttatgtccgcaatgggagcaaaggaaacaaagacggatagttctatggatgtcaaagaggctgtagctttaattgatgatgcagatgctaagatcaaggaagcagagaagtctcttgaagcgctgaacaaggaaaagacacagctgcaggcattagtggatcagattgttccatttaataatttgggatatgatgttcacaagctgcttgcatttaagtctgtaaagtatcgcttcggacgaatcccagtcgattacgtggaaaagcttatgcagtacacgtacgataatgtcaatacgatcttttacgaatgcaaaaaggatcaggattatgtatggggcgtatattttagcccaaagaatgagattgcaaagattgatgctgtttataaggcacttcactttgaacgttttcgccttccggatgagtatgagggtactccagaggaggcactggcactcttgacaaagcatattggtgagcttgatgctaagataaaggaaaagcagagcgagattgatcatgtgctttcttcaaagaaggaaaagatccttgctgcagtggcaaagcttaagcagttttcaaagaactttgatataagaagattggcagctgttacaggtgcagataagaaaaacttctatattatatgcttctggatgacagcgcgtgacgcaaagaaatttaaggcggagattgaaagtgatccaaatgtgatttgtcttatccatgatgacaacaaaaatcgtgtttcacagccgcctgtaaagcttcgcaatccaaagctgtttaagccgtatgagatgtatattcgtatgtatggtcttccaaattataatgagtttgacccgaccatattcgttgcactgacatattcctttatctttggatggatgtttggagatgtcggacagggcttagtgctcgtaatcggaggatttttgctgtatcactttaagaagatgaatcttgcagccatcataagtatggcaggtgtattctctaccttctttggatttatgttcggaagtatctttggttttgaggatgtaatagaaccgatttggctaagaccaatgtcaaagatgactgatcttcctatgatcggacgactgaatacggtatttattgtagcagttgcatttggtatgggaatgattcttctgacaatgataatccacattatcaatgcggcaaaaaatcacagtctcggtgatctgtgctttgatacaaacggaattgccggtcttgtattctacggactgcttgtatttgccatcgtaatgctgatgacaggtcacagccttccaggcggtgcactgcttgcggtactgtttattataccgcttctgtgtattgcatttaaggagcagctgactgatctttgtgagaagaaaaaggcagcggagaaaacaggtccagttatgattgttgttcaggcactgtttgagttaatcgaggtactgcttagctacttttcaaatactatttcgtttgtccgtatcggagcatttgctgtcagccatgcagctatgatgcaggttgttatgatgcttgcaggtgcagaaagcggcacaccgaatattcttgttgttattcttggaaatctctttgtatgcggtatggaaggtttgatcgttggtattcaggtacttcgtctggaatactacgagatgttctcccgtttctacaagggtgatggaagagagtttgaaccgtataacacaaagcagtaa

SEQ ID NO: 2463 - DNA, 3558 bp, unclassified Clostridiales
atgtatttaaaaagtattgaggtgcagggctttaagtcatttgcaaacaagacgctgtttgaattccataatggaattacctgtattgtcgggccaaacggaagtggaaagagcaacgtcgccgatgctgtgcgctgggtgcttggagaacaaagctctaagcagcttcgtggtgcaaatatgcaggatgtcatcttttcaggtacgcaaaacagaaagccacagggctatgcgagtgtggcaatcacatttgataattcagaccgtcatctaaatcttgattataatgaagttaccgtatcaagacgtatttatcgttcaggagaaagtgagtaccgtctgaatggaacacagtgccgattaaaggatgtcacggagcttttctatgatacaggtattggaaaagaaggatactccattatcggacagggtcagattgataagattttaagcggtaaaccagaggatcgccgtgagctgttcgatgaggcggcaggtattgtaaaatttaagcgccgtaaggtggcagcaaagaaaaagcttgagagcgagcaggcaaatatggttcgtctaagcgatattatgtcagagctttcaaggcaggttggaccacttgaaaagcaggcagcatcagcaaaggaatatctgagacttcgcgatgaattaaaacaatatgatatcgatgcatacgctgtagagagtacaaagacagagagtgatttagcagctcttgaaaaaaatcttgcaattacgacaagagactatgaagatacaaacagaagcagtgaagcattaaaagcaaagtatgaaagacagcaggacagcctgaatagtcttgatgctcagatcagtgcacttcgcgatgaaattagtgactgccagacaaatcgtcaggaaaaagagggtgccgttaatgtattgaaggaacagatcaataccgaatatttacggcgtactcatacgtcacagcgtatggaagtgcttgagaaagagcagaaggaatatgaagcacaattagaagaggaacaaaaaaagcgtcaggaatgcagccgcgaaagctatgacataacggcaaaaaaggacggcgcacagagtgttcttattcaggtgcaggatggacttgcttcatatcagcaggcattaaaggatgatcagggaaagatgatttccctgttaaatgaaaaatcttcctttgtgggagaactgcaaaaatatcagacgcttcttgaacaggcaaaaactgagcaggcgcagatgaaccgcagactcttagagagtaaaacagatgagtcaatttggcaaaaacgcgaaaaagagtgtcaggcagcataccaagaaatctcacagaaaaaaacagagctgacagaaaaacaggttgaactttcagatttgcttgaaaaggagcaaaagcgaaaagagcagctgcaaaatgagtattacgagcagcggcgtcttcatcaggtttctgttacgcgtgcagagtcacttagaaatcttgccgagcgatatgaaggttatggaaacagcatcaggaaaatcatggaggtcaaaaagcaaaatccaggaatccatggtgttgtggcagacttaattcatgtagaaaagcgttatgagacggcaattgagacagcgcttggaggtgcaattcaaaatatcgttaccgataccgagcagacagcaaagcacatgatcgaatatttaaaacagggccgttttggacgagctacgtttttgccgcttgatgcaatcacggtgcgagatgagttttcgcaaaaggatgcattaaaagagcctggcgtgattggactggcaagcagccttgttaagacatcagatatgtacaaaagattggtgtcatttttgctgggaagaattgtcgttgtcgatacaattgatcacggaatgaaagtttcagcaaagtatagaagaagccttcgcattgttacacttgaaggagagctgttaaatcttggcggatctatgacaggtggtgcctttaaaaacagcagcaacttgctgggacgaaatcgagagcttgaagagcttgagattaaaataaaaaaggaaacagaaaatttaaataagttgtcatcttcctttgaagaattagaaaagaaagtagtgaatctctcacagcagactcaaaaacagcaaaatgagattcaaaatttgacattaaaggagacggaaggacgtcttcgagtaagagaagcatcgcagcgcgttgaggaaattgtaaaagaccgcgagcatttaaataatgaacttgttttgcaggaaggaaagcttgagagaattaaagcaagctttgagcaggtagcaagtgcaatcaaggagcttgagtctgctggtgatgagtctaaagacagtgcagacagaaatcaaagctttgttgatgagatgatgaagcagcgcgacgatttgacaaaagaaatttccgagcttagcacaaagcagctgcagttaaagcagcaggagcaatttattttagctaatataagccggattgctcaggaagcagataaacgaaagacagagcaggaagaactaaaaacagtctttttggcatgtgaagatgctgtagcacaaaaaacggctcaaattgatgaagtgcaaaagcagatgcaggcacttgaggtgactgtgcagcaaaaggaagcagagctgtcaaaggtaaatgagcgaagaaatcatatcaatgattcattaaaaggcttttttgcaaagagagaggagctttcaacgagactatctgctcttgacagagaccttcttcgcatgaataaccacaaggaacgcttcgagagccgccttgacgagcttgctgagtatctttgggaagaatatgagcttcgtccgagtgatgctaaggcagcagcaaagagtgatagaccgcttagtgagctaaaagagcatataggtgaacttaaaaagagcatacgcggacttggcagtgtcaatgtaagtgcaattgacgagttcaaagaggtgtcagagcgatatacctttatgaagacgcagtacgaagatcttgttgagtctgagaagactttgcagaaggttattgaagaacttgatgagggtatgcgaaagcagtttaaggaaaaatttgaggaaattcgcgttgaatttgaccgggttttcaaagaacttttcggaggcggcaaaggtacacttgagcttgttgaggatgaggatgtgatagaggccggcattcgtattatctcacagccgccaggcaagaagcttcagaacatgatgcagctttccggaggcgagaaggcgcttactgcaattgcgcttatgtttgctattcagaatttaaagccgtcgccgttttgtcttcttgatgagatagaggcagcgctagatgattctaatgtaggccgttttgcaaactacctgcataagcttacggcaaacacgcagtttattgtaattacacatagacgaggaacaatgacttcagctgaccgcctgtatggtatcacgatgcaggagaagggtgtatccacactcgtaagcgtcaacttgattgaaaaggatctcgacaagtaa

SEQ ID NO: 2464 - DNA, 3270 bp, unclassified Clostridiales
atggagaaaacctacgaaatgctgcagcagtatgcggtaaactctttggaatatcagaaaggacgtgcccttcatcagcgcggacaggcagctttgtcaagcgctgaggaggcacatggaagaacacagatacaggcaacggttagagatttaagcagacgctatgatgtagaggtgacaatacaatcaacaggtcttgcagctgatggaaattggggagactttgatatagaggagtcttcatgttcctgcggcgagtatcatacaccgggaaaactttgccgtcatgagattgcggcagttttgcaatatttttgtgagggagagcttgtatcaagtgttcatacctcagctgcctgcataagtatgattcaggcatacgagaagcgttatacgctgcagtatcaaaaatccaatatttcagatgtaaaagtagtaccaaagtttgtgacagagggaaagaaaatcgagctggaattttttgccggaacacgtcatctttatcctattcgcgatctgactgcctttaaacagagctatcaaaaaggtgaggacatttcttttggtaagcagctttcgtatccaaactgtgaatattcctatgattctgattcggcagcattgattcaggtcatttgtctgcagattgattcctatttgaatcattggtctcagcaagaaaaatatacatttgataggaaaatttcaaatgttgagcttgaggaaggctttgccgatttgtatatgaaagcattttgcggcagagagcttgaactaatcgaggatggcaagagccgtatggttcatgttgtaaaggaaaatcctcaggtaaaactgatattagagaaaaagggaaaggatggcgcaagactgtggcttccagataagtggaagttagcagagggaaatcgccatatctatctttttggagaagatacagtttatatttgtgatgagtattacagccgcgctcttaggattttctacagaaatctgctgcaggttgcttatccgggaagcggatatatggatattaacaatagtgattttccgtcatttattcattatgtgcttccggagattcaggaaaatattaatttggaatgccgcgacttgtcgctggaggaatttgttccgccaatgcttcaggtgaaatttaccataaatttgtgggatattcttgagctgaagatggagacacgctatggcaaaagaatagttcatcttggtgaaaagtcagatacgaaccttgtgcgtgatgtggaaaaggagcaggcattaaaggatcttcttgaaagatatcttccaagcatggaaaaagatgaagaaaatggtcaggaagattgcgagcgctatattatcgaaaatggagatgctattggacgctttttggagttttgcctgccgcagctatattcatttggaagtgttgtgctagaagatggtctggctgatcttcattttgatgaggcacctcagatcaaggccggtatgcgctttatggatcattttttggagcttggctttgagagtgatgagttaagtgaaaagcagttaaaggatgtgcttagggcttaccatgaaaaacagcattatcatcgtcttgaggatggcagaatcttaaagctaagtgatgagtttgctgataagctggcagagtttgaggatgtgatggatattgatgcccgtgaagcagttgacaggccagtgagtcttccagggtatcgcttcttatttgcggatgagatgcttgcgtctatgcagggcattgattatcagccaggcaaggaaattcgcgacatggcagagcgtatgaaacgcactgagctggaaatgtatccagttccagaaactattggagcaacgcttcgtgagtatcagatctatggatatcgttggcttaaaatgctgcaggattaccattttaatggaatattggcagatgatatgggtcttggaaaaactttgcagacgattacactgctagtatctgatcagggaaagggaagctcaattattgtctgtccggcatcgcttatttataactggcagcatgagctggaattatttgcatcaaacttgcgcattcaggttgtggctggaaatgcaaaagagagaaaagaactaattgagcaatatacatcgtatgatgttttgattacgtcatacgaccttcttcgccgagatcttgagatctatgaaggctgtaaatttttctatcagattcttgatgaggcacagtatatcaaaaaccatatgacaatgaatgcaaaggctgttaagcagataaatgcagcatatcgtcttgctcttacgggaactccgattgaaaatagtttaagtgagctgtggagtattttcgactatctgatgccaggttatctgtacagctatacacgttttagaaaacaatttgagatgccaatcatgaaaaatgaggatgcagcggcgagaaatcgcctgcgaaaaatgacagcaccatttttgcttcgaagatcaaagtctcaggtgctttcagaccttcctgaaaaggatgaaaagactatttattctggaatggaagatgagcaaagaaagctgtatcttgctgcccataagcagcttgttgatcagctgcagggtattgacagtgcatattatgagaagaacaagatatttatcttgagtcagctgacaaagcttcgtcaaatttgttgtcatccagcgctttgctacgatgattatcagggaagctctgctaagcttgaggcatgtatggagcttgtgcagcgtgctgtaaagggaaaacataaggtattattgttctctcagtttacatcaatgttagatctgattcgtgagcgcttagctgagcagaatacaaagtattattgtttgacaggaaatacagataagcaggagcgtcagcgccttgttgatgcgttccagaatgacgatacacctgtatttttgatttcactaaaagccggcggcacgggattaaacttaacggcggcagatattgtaattcactacgatccgtggtggaatgtggcagcacagaatcaggcaactgaccgtgcacacagaattggacagaaaaacacagtaacggtgtaccgtttgatcgcaaaggactctctcgaggagggaataataaagctccaggagtccaagaaagcattatcagacgatattctttccatggacttcggagctattgcgtcgatgtctaaggatgagctgttagctcttctttctacgggagaggtagctaatcaggcaaagtaa

SEQ ID NO: 2465 - DNA, 3195 bp, unclassified Clostridiales
atgccaaaggatagcagtataaagaaggttcttgtaattggttcgggtccgattgtcatcggccaggcagcagagtttgactatgcaggtacacaggcctgccgttcattaaaggaggagggtgtatcagttgttcttgtaaactctaatccagcgacgattatgacagataaaagaattgctgatcatgtctatatcgagccgttaacagcagaggtgttagagcagattatcgaaaaagagcgtcctgacagtgttcttccgacactgggaggtcaggctggtctaaatcttggtatggagcttgcagagaaaggtattcttgaaaaatatggatgccgtttgattggtactacaccagagacgatcagaaaggcagaggatcgtcaggaatttaaggatacaatggaaaagattggagagccttgtgcagcatctaaggttgttcacaacattccagatggtcttgaatttgcagaacagatcggttatccagttgttcttcgtcctgcctacacacttggaggaagcggcggcggaatcgcatatgacaaagagcagatggaggaaattttaggaaatggtcttcgtctttcccgtgtaggtgaggttttggttgagcgctgcatcgcaggatggaaagagattgagtacgaggtaatgcgtgatggtgcaggaaatgtaattacagtctgcaacatggaaaacattgaccctgttggtgttcatacaggagatagtatagttgttgcaccgtctcagacgcttggtgataaggaatatcagatgcttcgtacctcagcgttaaatatcatcagtgagttaaagattactggaggatgtaacgttcagtacgcattaaagccagacagctttgaatattgtgttattgaggtaaacccgcgtgtaagccgttcctctgcactggcatcaaaggcaacaggttatccgattgcaaaggttgcagcaaagattgcacttggctacactcttgatgagattccgaatgccattacaaagaaaaccttcgcaagtttcgagccaatgttagactactgcgttgtcaagattccgagactgccatttgataagtttatcagtgcatcaagaaagctgacaacacagatgaaggcaacaggagaagttatggcaatctgtaataacttcgagggtggtcttatgaaggcacttcgttctcttgagcagcatgttgacagccttgtaacagatgagtacagcaagctgacggcagatgagtttgaggagcagatgagtattgtcgatgaccgcagaatcttccgcattgcagaggcaatccgtagaggctacagctatgaaaagatccatcagatcacaatgattgatccgtggtttattgacaagattgctattcttgtagagatggagacacgtctgaaaacagaagaacttactcctgatctgttaaaggaagcaaagcgtattgaattcccggataagttaatcgcatccttaagcggcaagactgaggatcaggtaaagaagatgcgctatgacaatggcatcacagcagcctttaagatggttgatacatgtgcagcagagtttgcagcaactacaccatattattattctgtttttggaagcgagaatgaggcgaaaaagacagagggaagaaagaaggttcttgttcttggttctggacctatccgtatcggacagggtattgagtttgacttctgttctgttcattgtacgtgggcatttgcaaaggaaggctatgagactgttatcatcaataataaccctgaaacagtttcaaccgatttcgatattgcagataagctgtattttgagccactgacaccagaagatgtggagagtattgtaaatctggagcatccagacggcgctgttgttcagtttggcggtcagacagcaattaagctgactgaggctttaatgaagatgggagttccgattcttggaacgagcgcaaaagacgttgatgcggcagaggatcgtgagctgtttgatcagattcttcgcgagacaaagattccgcgcgcatcaggcggcactgtatttacagtagaagaggcattaaaggttgcgcatgagcttggttatccagttcttgttcgtccgtcatacgttcttggcggtcagggtatgcagattgcaatcaacgatgaggatattacgcagtatattggtattatcaatcgttatgcacaagagcatccgattcttgtagataaatatctgatgggtaaggagcttgaggttgatgctgtatgtgatggacaggatattttgattcctggtatcatggagcatattgagcgtgcaggtattcactctggtgatagtatttctgtttatccggcaaagagcataagtcagaagacaaaagaaactatcgttgagtatacaaagcgtctggcaagagcgcttcatgtaagaggtctgattaatattcagtttatcgagtatcagggagctgtttatgtaatcgaggttaatccgcgttcttcacgtaccgtaccgtatatcagtaaggtaacaggaatcccgattgttgatctggcaacacaggtcatcattggaaatacaattcgtggtcttggttatgagccaggtctgcaaaaggaagcagattattatgcaattaagatgccggtattctcctttgagaagctgcgtggagctgatattgcacttggaccagagatgaagtcaacaggtgagtgtcttggaatcggcaagacctttaacgaggcactttataaggctttccttggtgcaggcttccatcttccaaagtataagaagatgattattacagttcgcgatgatgataaggaagagatcgtagatattgcaagacgtttcaaggcaattggctacgagatctatgcgacaaagggaacaggagcagcacttcgtgcaaagggagtggatacactttatataagcaagctggagcaggattcaccgaatcttcttgatttgattcttggccatcagattgatcttgtcattgatacaccaacacagggcgcagagcacagccatgatggttttattatccgtagaaatgcaatcgagacaggtgtaaatgtactgacagcaatcgatacagcaaaggcattgattactagtcttgagaatagagaagagcagctgacactgatcgatatcgcaaccatttga

SEQ ID NO: 2466 - DNA, 3303 bp, unclassified Clostridiales
atgcaaaaggcaagtgtatgggcagaaaaagtcatgattcctacatatgagattggagaggcggagaagaatccgatttttctggaaaaacgtgtgtatcagggaagctgcggaaaggtatacccgtatccgacgattgaaaaaataagtgatgagaagaaggataaggaatatacggcagtatggctggaaaatgagtacattaaggttatggttcttccagagcttggcggacgaatccagagggcatatgataaaacaaatgattatgactttgtttactataaccaggtgatcaagccggcacttgttggtttgacgggaccgtggatttcaggaggtattgaatttaactggccgcagcatcatcgtccgacaacatttcttccagttgattatgaaattcaggaaaatgaggatggaagcgtttctgttttatgtcatgacgtggatcagatgtatggaacaaagggacttatgagaattagcgtatacccgggaaaagcttatatagaaatcaagggacagctgtataaccgcacatcacttccgcagacatttctttggtgggcaaatccagcagttcctgttaatgacaacacacagtccattttcccgccagatgttcacgctgttatggatcatggaaagagagatgtttctcgtttcccaattgcgacgggtgtttattataagaaggattacagcgaaggcgtagatatttcccgttacaagaatattccagtcccaacttcttacatggcagaaaagtcaaagtatgattttgtcggaggatacgactatggaaagcatgctggtattttgcatgtggcagatcatcatgtttcaccgggaaagaagcagtggacctggggctgcggtgattttggaaaggcatgggatcgtaatctgactgatgaggatggtccatatgtagagctgatgacaggtatgtttacagataatcagcctgactttacatggttaaagccgtttgaggagaaaacatttacacagtattttatgccatacaaggaagttggacaggtaaagaacgcatcaaaggaagctgctgtttcactttcggcagcaaatgatgcggcaactggaaagaagactgcaaagattattgtctatgcaacagctgtatatgaaaaagcaagaattattctgacaggaaaagacggcgtgctgtgtgatgagagcgcaatgatttctcctgttgacatttttgaaaagagtgtagtactgccagatgatacgcaggaagaagatctgaaagttgaagtttgtgcagatggcagaagcttaattgcataccagccagagaaggaagaaattccaaagcttccagatccggcaaaggcagcagatgaaccgtcaaagatcatgacaaatgaggaactgtatttaacgggacagcatattgaacagtaccgtcatgcaacatggagacctgatccttattatttagagggattaaagcgtgatccagatgatattcgcattaacaatgcatatggtatgctcttgatgagaagaggcttatttaaggaggcagaaccttattttagaacagctattaagcgcctgacctggaagaatcctaatccatacaacagcgaagcatattatctgttgggacttgatttgtgttaccttggaagagaagatgaggcttatgatgctttttataaggcagcatggagcaatgaacagcaggaaatgtcattctattatatggcagcgcttgcggcaaagaaaggtcaatttgaaactgcgcttgagcacattgatcgctcacttgttaagaatgcgcataatattaaggcaagaggattacgtgcatggcttcttgcaaagcttggaaaagaaaaggctgcagctcgtatgatcgaggataatttagaacttgatccatttgattttgtatctggttttgaggcaataaaggcagagaatgattcagaaaagaagcagaaaatgcttgatgacttgaatggactgatgcgtaatttccaggaaaattatttgatgacagcaagagattttgcgcagtggggcgcatatgaggacgctgttttagttttaaagcagtgcacaaagaaatatccgatgctgtattattatgcagcttattatgaagaaaaaatgggtgaagatgaggcagcaaagaagtcacttgagaaggcagaaagctgtgctttcgattattgcttcccgaataagcttgatgatattgctgtacttacatttgcgattgaaaatggctgcaaaaagaaggcgccttattaccttggcaatcttttttatgataaattacagtggaagaaatctgttgaattgtgggaaatgtctgagaaggcagatgacacattttcaatcgttcatagaaaccttgcactggcttattacaacaagatgggtgattctaaggcagctaagtgtgaactagagaaagcattttcattaaaccgcaaggatgcccgtattttccttgaattagatcagctttacaaaaagcttggatatagcttcaaagagcgtttagcaaaatatgatgaagatccatctcttgcagagagccgtgatgatttgtatattgaatatattactcttatgaatatgtgcggagaatatgaacgcgcttatcgctgcattatgggacgccgtttccatccgtgggagggcggcgaaggaaaaattacaacgcagtatactatttccttactcgagatggcaaaacagtgcttggcatcagaaaaatatgaacaggcagagaagttgcttaaaaaagcacttgtatatccagaaaatcttggagaaggcaagttagagggaacaaaggataatcatctgttttatcatcttggacttgcacttgaagcacagggaaaacatgatgaagcaaaaacatgttttgagactgcgacgattggaacagatgaaccagcgggtgctatgtactataatgatcagccggctgatatgattctctatcagggacttgcatttgaaaaattaggaaaaacaagagaggcaaaatcacgtttttatcgtctgattgattacggtgagcagcatttaaatgatgagggcaagattgaatactttgctgtatcacttccagattttctgatttttgatgaggattatacaaagaaaaatcgtgcacactgctgttatcttatggcacttggaaatattggattgcaaaaccgcgaaaaggcagcagaatttttaaatgaggcgcttgaaatagagccgtctcatatgatggcaacactatatcagaaacaataa

SEQ ID NO: 2467 - DNA, 1917 bp, unclassified Clostridiales
atgagcgacgaatacggagcaggtcagattcagatactggaggggctggaggcagtcagaaaacgtccgggcatgtatatcggaagcacatctgagagagggcttcaccatctggtatatgagatagtagacaatgccgtggatgaagctctggcaggtgtctgcaccaagatcgatgtgatcattcataaagacaattcaattacagttgttgataatggacgaggaattccgattggaatccatccgaaggctggcattccagcggttgaggttgtatttacaattcttcatgcaggcggaaagtttggcggcggaggatacaaagtttcaggaggtcttcatggtgtaggagcatctgtcgtaaatgcactttccatttggcttgaagttgaaatttatcatgagggcaaggtttatatgcagcgctatgagcgtggtcatgtagtaaacaagcttgccgaagtggatacctgtgatccaaacaagcatggaacaaaggttacgtttaagcctgacggtgaaatttttgataccttagtctacaattatgatacgcttaaagagcgtcttcgtgaaatggcgtttttgacaaagggattgaaaattattctgacggatgagcgtgaggagccaaatctttgcgagacattccactatgagggtggcattaaggagtttgttgagtacttaaatagtgcgaaggagccgctgtatccgcagattatttactgtgaaggaacaaagaataacgttgctgttgaggtagcaattcagcacaacgattactacaacgaaaatatttacagctttgtcaataacatcaacacaccagagggaggaacccatctgtctggttttaaggcggcattgacagatctgtttaataaatatgccagagcaaataagcttttaaaggacaatgaggattcattgtctggggaggatatccgtgagggtatgactgctgtaatcagcattaagattgaggatccgcagtttgaaggtcaaacaaagcaaaagcttggaaacaatgaagccagaggtgctgtatctgcaattgtaagtgaacagttaacatattttctggaacaaaatccaagcgttgcgaagatgatctgtgacaaggcaattcttgcacagcgtgcacgtgcggcagcgagaaaggcacgtgatctgacaagaagaaagacagcacttgattcaatgacgcttccaggcaagttagcagactgtactgataagaatccagaaaaatgcgagatctacattgtagagggagattctgctggtggttctgcaaagacagcgcgtgatcgtgcaacacaggcaattttacctcttagaggaaagattttaaatgttgagaaggcacgacttgatcgtgtatatgaaaatgcagagattaaggctatgattacagcatttggaacaggtatacatgaagattttgatattacaaagcttcgctatcataaaatcattatcatgactgatgccgatgttgatggtgctcatatcgcaacactgcttctgacatttatctatcgctttatgccggagttaatcaagcagggctatgtataccgtgcacagccgccgttatataagctggagaaaaacaagaaggtctggtatgcgtactcagatgaggagcttgcagcaattcttgatgaggtaggaagagaccaaaataataagatccagcgatacaagggacttggagagatggacgcggaacagctgtgggagactacaatggatccaaagcatcgtgttcttttgaaggtaaactttgacgagtcatacgcatcagatattgatgttacctttaacaccttgatgggagaccgcgttgagccaagaagactctttattgagaaaaacgcaaagtatgttaagaaccttgatatctga

SEQ ID NO: 2468 - DNA, 2496 bp, unclassified Clostridiales
atggacgaaaccatatttgataaagtgcaggagatcgatctgaagaaaacgatggagcagtcatatattgactacgctatgagtgttatctctcagagagcgctgcctgatgttagagacggcttaaagccagtacagagaagagttttatactccatgatcgagttaaacaacggtccggataagccgcatcgtaaatgcgcacgtatcgtcggcgataccatgggtaaatatcatccgcacggagacagctcaatatatggagcactagtcaatatggcgcaggagtggtctacccattatccgcttgttgatggccatggaaactttggttctgtggatggagatggcgcagcagccatgcgttatacggaggcgcgtctgtctaagattgcaatggagatgcttgcagacatcaataaggacactgtaaatttcagtccgaactttgatgagacagagaaagagccagatgtgcttccttgccgtttcccaaatcttttgtgtaacggtaccactggtatcgcagttggaatggcatcaaatattccgcctcataacatcaaagagacaattgatgcagttgttaaaatgattaacaaccgtattgacgagaatcgtgatacagagattgaggagctgatgagtgttattcagggaccagatttcccaacaggtgcaacaattattggccgacgcggtatcgaagaggcatatcgtactggaaagggaaagattattgtccgtgcagtaacaaacattgagccgatgcaaaatggcaagaaccgaattgtagtaacggagcttccttatggtgtcaacaaagcaaagctgatcgagaagatcgcagagcttgtaaaggataagcgtgtggatggaattactgatttagccgatcagtccagtcgtgaaggaatgcgaatttcaattgaactgcgccgtgatgtaaatcctaatgtggtgttaaatcagcttatgaagcatacacagctgcaggacacatttggtgttatcatgctggcgcttgtcggcggcgagccaagaatccttaatatccatgatatgctgtattattatctgcagcatcaggaggaggttgtaacaagacgtaccagatacgatttaagtaaagcacaggagcgtgctcatatcttggagggactgttaattgcactggatcatatagatcgtgtgattgagatcattcgtggttctgcaaatgtagtagctgcaaaagcatcattgattgaagagtttggtctttcagatgcccagtctcaggcaattgtagatatgcgtcttcgcgcattgactggattggagcgaaatcgtctggaaaatgaatataaggagctagaggagcgaattgcttacctgcagagtattttaggtgatgagaaggtattgcttggcgttattcgtgatgaacttcttacgattaaggctaaatatggtgatgaccgtaaaacggcaattgagctggcagaggatgaatttaatgcagaggacttaattccaaatgaggcagctgttattgctatgacaaagcttggctacattaagagaatgtccccagatcactttaaggcgcagaaccgaggcggcaaaggtattaagggaatgaatatcttagatgaggactatattgcagatctgattacaattaataatcatgattatgttcttttctttacaaatctcggaagagtgtaccagcttaagggttatgagatacctgaggcaagtcgtactgcaagaggaacagctgttattaatctgctgcagctgcaggcaggtgaaaaggtaacttcgattcttagaaatgagggacatgagtctggttatctgaccatggcaacaaagcttggcatgattaagagaacaaatctgtcggaatatggaaatattcgtaaggtaggattggcggcaattagtctgcgcgagggtgatgagctgattgacgttcatgttacagatggaaagcgtgatatcatcatgatttcacatctaggtcagtgtattcgctttgatgaaaatgatgccagagcaacgggaagagtatccatgggtgtaaagggtatgaacctggcagatggagacagtgtaattggcatgcaagtcgcagaggagaatggtgagcttctttttgtatccgaaatgggtatgggcaagaagactgctatgagtgaatttaaagaccagaatcgaggcggtaagggtattcgctgctatcgcgtcaatgcaaagaccggtaatttggctggcgtaaaggtatataaagagggctatgagctgatgttaataacaacggaaggtactgtgattcgtatgaagacagatactattcctgttttaggaagagatactagcggtgttaagctaatgcaggtagatcaggaaaacgttaaggtatcaagcattgaacttattgaagaatctaaggaagaagaatttgctgagacttctgaggagactgtaggttctaaagaagtgtaa

SEQ ID NO: 2469 - DNA, 2754 bp, unclassified Clostridiales
atggagcaaacggctcagataaaagaatgtgcacataccgttgccggaattgtggcgcacgtagatgcaggaaagacaacattggctgagagtatgctctacctgacaggcggcacaagaaagctgggaagagttgaccacaaggatgcatttttagatacgtatgagcttgagaaaaacagaggaattacgattttttccaagcaggcagagctaaatttgaaaaacagaaagcttacgcttttagatacgccaggccatgtggatttttcggcagagatggaacgaacacttcaggtgcttgattatgcaatattggtaattagtgttgcagatggcgtgtctggtcatgtgcagacattgtggcgtttgttaaagcagtataatgttcctgtatttctttttattaataaaatggatcagccaggtgctgataaagaagaaacgctgctgcagctgcagaaacgccttgatggccgctgcgtagacttttctgatcttgaaaatttcgatgagcgtctggcagagacagatgaggaattattggaacagttctttgagactggaaagattagactggaacatataaaaaagcagatcaaggatcgaaagctttttccatgttattttggctcagctttaaagatgcagggtataacagaatttctggaaggctttgagatgtatacgacagtaccagtgtatggcgatttgtttggagcacgtgtatttaaaattgcacgtgatgcacagggaaaacgactgacatatttaaaggtgacaggcggtgtgcttaaagcaaagcaggtgattggtgaggaaaagattgatcagatccgcgtctactcaggtgcttcatttacatcagtatcagaggcacagcctggtatggtttgtgccgtaactggattaaatgatactgtgacaggacaaggtttaggctgtgagattcaggcgcaaacgccgattttggaacctgttcttacatactgcgtgtcattttcgccagagattgatattcacgagatgtatagaaagctttctgtgttagaggaggaggagccgcagctgcagcttgtatggcaggaggagacttctgagattcatgcgagagtcatgggtgaggtgcagattgaaattttgcaaagtttgattcgtgagcgctttggcgtggaagccttttttacttctggttccattatttacaaggaaactgtggagaatactgttgagggaatcggtcattttgagccgcttcgtcattatgcagaggttcaccttttaatagaaccgggagaaccaggcagcggaatggtttatgagacaaactgcagcgaagatttgctttcaaagaactggcagcgccttattataacgcacctagaagaaaaaaaacataagggtgtgctgacaggctcagagctgaccgatacgaagatcacacttatagcaggccgtgctcacataaagcatacagagggaggagattttagacaggctacttaccgtgctgtcagacagggtctgatgcaagcaaagagcagactcttagagcctgtgtacgcgtaccgtcttgaaattccatcagaatgtattggaagagcaatgactgatattcagcagatgtgcggtacgttttctgctcctgagcaggaaggagagctaagcatactttctggaacagcaccagtatcaacgatgcggggctatcaaagagaggtcgttgcctacagcagaggtcatggtcgtcttttttgtacattaaagggatatgcaccgtgccacaatgaggaagaggtagtggaacgcatcggctatttgccggaagcagatctgtcaaatacgccagactcagtattttgcgcgcatggagcaggctttgttgttccatggtatgaagtgccagattatatgcatattgaaggtatggagcaggaatcagaagaagagaaaatgcttcgtgcagcaaatgaggcaaaacgtgctaagcaggaaatagtacgttctcttgaagactatgaggcagagaatgaggagctaaagcagatctttgagaggacctatggacctgtaaaggtgtatcgccaagatgacgaggagcagtatcaatcctcagcgccaaagggagtatctacatatcgtccaacaaagaaaaagcagcaagaagaggaatatcttcttgtagatggctataatattatttttggctggccagaattaaatgagctttcaaagacagatattgcggcagcaaggcttacattgatggatattttaagtaattatcagggttacagcaagtgtaagctgatccttgtgtttgatgcctataaggtgccaggaggaacagagcatgttgaaaagtaccacaatatttacattgtgtacacaaaagaggcagagacagcagatcaatatattgaaaaaacagttcatgcaatgggaagaaagcatcgcgtaactgtggctacatcagatggtcttgagcaggttatcattcttggacagggtggtgtacgtatgtcagcacttggcttaaaaaagcaaattgaaagtgccggtcatgagattcgcgaaatgtgcacaacaaagtcagacagcggtaaagtctatttgtttcatgagacatctgatgatgttaagaaaaagcttgatgagattcgtctggaaaaaaatgatagaaaaaatgataaaaaattgatattgggaaacagggggaaaagtaaaaaaacatttgaaagtgatttcgactga

SEQ ID NO: 2470 - DNA, 1893 bp, unclassified Clostridiales
ttgaaaaagtcaaatggaataatcgcatataccattattattgcaattgtaattgcattaattttcttctttcagcgttctctttatacgcagactaatgtaacatactcgcagtatcgttcatttgtggaagaagaaaaaatcgctcaggcacagattgaacaaaatgcgaaggtgccgacgggcagtgtgttgttttttgtcagtggttcatcgacagaatatcgtgtattcgtatcagatgtcaatgctgagttagaccgtctgcaggataacggtataaaagttaccctgacagcagttaaagaaaattattttctaaatacacttcttcctgtacttattttagtcataggaataagctttgtgttcgtagcaatgacaggccgtatggcagcaccgggaggtggcagcggaggcggtcagagcatggcaaacttcggaagaagcagagctgttatggaaacaggcggctccaagaaagttttatttaaggatgttgccggtcttcaagaggagaaggaagaacttgaggaagtggtggattttcttaaaaatccaaatatgtacacaagccttggcgccagaatcccaaagggtatccttttagtaggccctccgggaacaggaaaaacattgcttgcaaaggcagttgccggtgaagcaggcgtgccatttttctcaatctctggttcaaactttgtagagatgtttgttggtgtcggtgcatcacgtgtacgagatttgtttgaacaggcaaagagaaatgcaccttgcatcatttttattgacgagatcgatgccgtagccagaagaagaggaacaggtcttggcggcggtcatgatgagagagagcagacattaaaccagatgcttgtagagatggatggttttggtgtcaatgagggaatcatcgttatggcagcaacaaaccgtgtcgatattcttgatccggctatccttcgtcctggacgttttgaccgtaaggtggcagtaggacgtccagatgtaaagggacgagaagaaattttaaaggtacacacaaagaataagccgcttggctcagatgtaaacttaagacgtgttgcgcagacaacagcaggatttaccggagcagatctggaaaatctgatgaatgaggctgcgatcaatgcggcaaagagcaaacagggctacatcagccagcgcgatatagagcagtcctttgttaaggtgggaattggtgcagagaagcactctaaggtcatcagcgacaaggaaaagcgcatcacagcataccatgagtcaggccatgcaattttgttccatgtattgccgcatgaaagtcaggtacacaccatttcaattattccaactggaatgggtgcggcaggctacacaatgccgcttccagaggcggatgagatgtttatgacaaagaagcgcatggaagaagatattatcgtagcatttggtggtcgtgttgccgaggaattgatatttggcgatgtcacaacaggagcatcacaggatatcaagcaggcgacagcgacagcccgtgcaatggttgtaaaatatggtatgtcagaacgtcttggaaccatcaactatgaggacagcggtgaggaagaagtattcctcggcagagatctgggacatgcaagaagctacagtgaagatgttgccagagaaattgatatagaagtgaagcgtattattgatgaggcatatgcacaggcaaagacgattattactgagcatatggacgtgcttcaccgctgtgcacaggtattaatcgagcgtgaaaaaattggaaacgcggagtttgaggcgatctttgatggaagggagcttccagagccgggtgcagagcagacatctctcatgtcaggtatgccatcagaaggcagataa

SEQ ID NO: 2471 - DNA, 1989 bp, unclassified Clostridiales
atgaatccaagcgaaaagtatgaaaaacagtattttatgccgccggtcgtgacctatgattgggtcaagaaggatgatatcgatcatgcaccgatctggtgctctgttgacttaagagacggaaatcaggcgcttgtagagccaatgagtctggatgagaagattgaattttttaagatgctggtagagattggctttaaggaaattgaaatcggatttccagctgcttcagaaaccgagtaccagttttgccgtaccttaattgagcagaatttgattccgtctgatgttacgattcaggtattgacgcaggcaagagagcatattattaagaagacttttgcggcgattaagggagcaccgagagcagtcgttcatgtgtataactccacatctgttgcacagcgtgagcaggtatttaagaaagataaagagcatgtaaagcagattgcaattgatggtgctgcattgttgaaggagctggctgataagaccgatggtaactttacctttgagtacagcccggaaagctttacaggaactgagatggattatgcacttgaggtgtgcaatgctgttttggatgtatggcagccgacaccagacaataaggtgatcattaatcttccggcaacagttgagaatgcaatgccgcatgtattcgcaacacagatcgaatatatgaataaaaatatgaagtaccgtgacggagttgttctttcacttcatccgcataatgacagaggctgcggtgtggcagcggcagagttaggactgcttgccggtgcagatcgtattgagggaacgctttttggaaatggtgagcgtaccggaaatgtggatattatcacattggcgatgaatatgttctcacatggtattgatccgaaactgaatttctctaatatgtcatctttagtagaggtatatgagagggtgacaggcatgagagttcatgagcgtcagccgtatgcaggaaagcttgtatttactgcattttctggttctcatcaggatgcaattgcaaagggcatggcatggagagaagctggaaagagtgaaaagtgggatgttccgtatcttccaattgacccgaaggatgtaggacgtacttatgattcagatgttattcgtattaacagtcagtctggaaagggcggcgtatgctatgtactgcgcactaactttggtttgagtcttccggaaaatatgcgcgaggaggttggctatactgttaaggatatttctgataaggcgcataaggaattgacaccggcaattatttatcagatttttgaggatcactatgttaccagtaagtcaattttccaggtcagcgagtgtcatttccgtcaggaaaatggaattgtggcaaatgcaacaattcagcatggccagaatacacaagtcgttacaggaacaggtaatggacgtcttgatgccgtcagcaatgcgattaagaattattttaatgtcagctatgagcttagtttctatgaggagcattctctgacaaagggaagttcttcaaaggcagttgcatatgttggtgttgtttgcaatggaagacgttattggggtgttggaattgacaacgatatcattaaggcttcaattgaggcgctgacagttgcagtaaataagattgaagagattcagaatgcgcagtttgccaaggacaaaagaatggttgagatcatgaactatattcagtcaaattatttaagtgtcactcttgagggactgtctgataagttctatttgtcaaaaccgtatttgtcaaaatacatcaaagaaaaatcaggcatgacatttggcgagcttgtaaaaaatgtacgtctgaagaaggcgaaaacattgttaaagacgagttcaatgactgttgaaagcatcgcgctttctgttggctatcaaaatgtagaacattttaatcgcctgtttaagaaagcatttaatatgacaccagttcagtttcgcaataaaaagtaa

SEQ ID NO: 2472 - DNA, 2844 bp, unclassified Clostridiales
atggaaaataagaaatttatccgaatccgcggtgcagcagagaataatctaaagcacattgatttagatattccaagagatgaacttgttgtgctgactggattgtctggttcaggaaaatcctcacttgcatttgacacaatatatgcagaggggcagaggcgatacatggagtcgctttcatcttatgcaagacaatttttaggccagatggaaaagccaaatgttgaaagtattgaaggtttgccgccggcaatctccattgatcagaaatctactaatagaaatccgcgttctacggtaggtaccgtaacggaaatctacgactattttcgtcttttatatgcgcgtattggtgttccacattgtcctgtctgtggccgaaagataagccgtcagactgttgatcagatggtggacagtttgatggcacttaaagagcgcacgaagattttattgctggcacctgttgtgcgcggaaagaaaggccgtcatgagaaagttttggagcaggcaagaaagagcggctatgtgcgtgtgcgcattgatggcagtcagtatgatctggaagaggagattacgcttgataagaatataaagcataatattgagattattgtagatcgtcttgtcataaaagagggtattgaaaagcgtcttgccgattcactggaaaatgtgctaaagctggcagatggtcttgcttttgtggaggttgtggatggaacaccaatgacgtttagccaaaacttttcctgccctgactgcggcataagcatcgatgagattgagccgcgaagcttttcatttaataatccatttggtgcgtgtccgacttgctttggacttggctataagatggagtttgatgagcagctcatgattccagatcagtcgcttagcattgatcagggggcaattattgtgcctggatggcagtcatgtaccgatgaaggcagttttacaagagcgattttaaatgcacttgcagaggagtttcatttcacgctagacgtgccatttgagtcgtacagcaaagaaattcatgatattttgatacatggaactaataagagtgtaaaggtgcgctacaagggacagcgcggggaaggcgtgtatgatattgtatttgagggcttaattaaaaatgtagagcgccgttaccgtgagacaggttcggaaacaatcaaagcagagtacgaaacatttatgcgcatcacaccatgttctacatgtaagggcatgcgtctgaaaagagaatcacttgccgtgacagtggcagacaaaaatatttatgaggtgacaaatctttctattcgtgatctcgcatcatttttatctaatttgacgcttactaagacgcagcagctgataggtgagcagattttaaaggaaatccgagcgcgcgtacagtttttgattgatgtaggtcttgattatctttgcctgtcgcgtgcaactggtacgctttcaggcggtgaggcacagcgtattcgtctggcaacacagattggctctggtcttgtcggcgtggcctatattttagatgagccaagcattggtctgcatcaaagagataatgacaagctgcttggcacattaaagcatcttcgtgatcttggcaattctgttattgtcgttgaacatgatgaggatacaatgcgtgctgccgattatgtagttgatattggacctggtgcaggtgaacatggcggtcaggttgttgcagcaggcacggcagaagaacttatgaaaaatccggcatccataactggaaaatatttgagcggtgaacttaagattccagttccaaatacaagaagagaaccgcagggctggctgactgtagtgggagcaaaggaaaataatttaaagaatatcacagtcaattttcctaagggagtctttacatgcgtaactggtgtatctggttctggaaagagcagccttgtcaattcgattttgtatcaggcgcttgcaaagcagctaaaccgtgcgagaaccattccaggtgcatataaagagattaagggcatagagcagtttgacaaggtaataaatatagatcaaagtccgattggccgcacaccgcgctctaatccggcaacttacactggtgtgtttgatatgatccgtgatctttttgcttcaacagttgacgcaaagacgagaggctataataagggtcgttttagcttcaatgtaaagggtggacgctgtgaggcatgttccggtgatggtatcgtaaagattgagatgcactttttgccagatgtgtatgtgccatgtgaggtctgcaagggaaaacgctataacagagaaacgctggaagtaaaatataagggaaagagtatttatgatgtgcttaatatgactgtagaagaggcgcttacattttttgaaaatgttccgtctatttaccgcaaaattgagacattgtatcaggtaggtctttcatatatacgattaggtcagccatccacaacgctttcaggcggcgaggcacaacgtattaagctggcgactgagttaagccgaaagagtacaggaaagacaatttatattttagatgagccgacgacaggacttcattttgcagatgttcacaagcttacagaaatgctgcagaagcttgtagaaaacggcaatacggtaattgtaatagagcacaacttagacgtaataaagacagctgattatatcattgatatgggaccagaaggcggagacggcggaggaacagtagtagcgcagggaacgccggaagaagtggcagagtgcccgcagtcctacacgggatactatgtaaaacgtgttatagctcacgagacacctactatttaa

SEQ ID NO: 2473 - DNA, 2193 bp, unclassified Clostridiales
atggatattattaaaaagatagcagaagaactgcaaattcgccctgatcaggttcaggcagttgtaaatttgattgatgagggcaataccatcccttttattgcgcgctaccgcaaggaagcacacggtgcattaaatgatgagatacttagaaatctcgatgaaaggctgacatatcttcgcaatcttgaagagaaaaagtcaagtgttcttgcttccatggaagagcttggcgtcctcacagatgatctgaaaaagaaaatggagcaggcacagacattagccgtcatagaagatctttatcgtccatatcgtccaaagcgccgtacaagagcgacaattgcaaaagaaaaaggcttagagccgcttgcaaatgaaatattattaggacaggcaaaaggaacaaaagaagagcttgcaaaagcttttgtatcaccagaaaaaggtgtggaaagcacagaagatgcacttttaggtgccatggatattttagctgagcacatttcagatgatgcttcatttcgtgcccagattcgtaaaatgacatgggaaaaaggtatgctcacctccacagttcgcgaagaaggtacagagtctgtatttgaaacatattatgagtttcaggcacagcttacaaagattaatggtcatcaggtgcttgctgtaaaccgcggagaaaaccaaaaggtgctgagtgttaaaattgaggcaccgcaggaagaaattcttacctggttatataatgtaatgacaaagggaaagaacgaaacttgtgcagctattcttcgtgaggctacagaggatgcatataagcgtctgatcgctccggcaatagagcgtgagcttcgcactaatctgacagagacagcagaagagggcgcaatgaaggtgttcggacaaaatctaaagcagcttttgatgcagccgccaattgcaggtcagactgttcttggctgggatccggcctttcgtacaggctgtaagcttgctgtaattgatccatttggaaaggtaattgacacaaaggtcatttatccgacagcgccgcataacaaagtaaaagaatcaaaagatatcttaaaagcacttattgcaaagtaccatattacattgatttcagttggaaacggaacagcatcgcgagagtctgagcaaatcattgcagatttgattaaggaaatcaatgcgcctgtgcgctatgtcatcacaaacgaggctggtgcttcagtatattctgcaagcaaacaggcaacagaggagtttccaaactttgatgttggccagagaagtgctgtttctatcgccagacgtgtgcaggatccgcttgcagagcttgtcaagattgatccaaaggctatcggtgtcggccagtatcagcatgatatgaatcagaaaaagctcgatgagatgcttcatggaacagtagaagactgtgtaaatcaggtaggcgtggatttaaatacagcttcagcagcgcttctcgaatatgtgtcaggcatcacgaaaacaattgcaaaaaatatcgttacttaccgcgaggaaaatggtcagtttacaaatagaaaacagttgttaaaggttgcaaagcttggaccaaaggcatatgagcagtgtgcaggttttcttcgtattcgcggtggagatgagccgcttgatgctacagccgttcacccggaaagttacgaggcagcacgtgcagttttagcatcatgtgaactaaagccgcaggatattttagagggaaaggctgcaggcattgcaaagaaacttcagacagccaagcttgcaaagcagcttggaattggtgaacttacacttactgatattgtaaaagaattagaaaagccatcaagagatccacgtgatgaaatgccaaagccaatccttagaagtgatgtcctgtccatggaagacttaaagccagatatggaattaaagggaacagttagaaatgttgttgattttggagcatttgtcgatataggtgtgcatgaagacggactagtccatctctcacagctttgtaaccgctacgttaagcatccgtcagaggttgtaagcgtaggagatattgtaaacgtcagagtgcttagcgtagatttaaagaaaaaacgaattgcccttactatgaaaacaaaggtaagttgtaaaatgaatgcgaaaggaaaaaatctgacgcatttcatggaaata

SEQ ID NO: 2474 - DNA, 1884 bp, unclassified Clostridiales
gtgagccatacagttcacgcgtcatgccccggaggcttattgactttaaagaacgtgaatgatataatcgtaacgaaaaaagctagaatctacaggtggtctagaaaggatataatacctatgcagggacgtacacacaattgtggtcagttaagactggcaaatgtcggcgaggaagtaaagcttgtcggctggtatgaaaatctccgtaaggtcagcaagaatcttggatttttgattttgagagacttttacggaacaacacagattgtagtagagacagaggaaatcatggagcagctgtcttctatcaactatgagtctacaatcgaaattattggaactgtaagagagcgcagttctaagaacgcaaatcttccaacaggagagatcgaggtagttccaagtaagcttacagttcttggaaagtgccgttacaacgagcttccgttccagattaaccattcaaaggaagcagatgagaatgttcgtctgaaatatcgttatctggatctgagaaatccgcaggttaagtcgaagattgttttgagaagcaaggttgttgcagatcttcgtgcttctatgattggtcatgattttatggaaatcacaacaccaatccttacatgttcttctccagagggtgcaagagattatcttgttccggcaagaaatcatccgggcaagttttatgctcttccacaggctccgcagcagttcaagcagcttcttatgacctctggaattgaccgttatttccagattgctccgtgcttccgtgatgaggatgcaagagcagaccgttctccgggtgagttttatcagcttgatatggagatggcatttgctgatcaggaagacgtatttgagattcttgaggatgttcttccaccaatctttgcaaagtatggtatttaccatgaggcatcaaagccgccgtttaagagaatcccatatcttgaggcaatggacaagtatggttctgataagccggatcttcgtatcagcctgatcgttcaggatgctacagaagtgcttgcagaatgtggctttggtccatttgcaggaaataaggtaaaggcagtcgttgctgaaaacttcaagggtaccagaaagcagatcgataagatgtgtgctgatgttgaggtagtaagcggtcagaaggcatattggttccgtttagatgacaagggcgagctgactggaggaatctccaagtttgttgttgatcacaaggatgcagttgtgagcgcacttggcttaaaggcaggtgatttcgttgcactgtctgcaggtgacttaaagactgctcagaagacagcaggtgtcatccgtaagacaatcggtacttcattcgaaggctatatgaagaaggattgctatgagttctgctgggttgttgacttcccgatgtatgagatcggtgaggagtctggcgaattagagttctgccataatccattctctatgccgcagggtggtttacaggcacttgagactatgaatccgcttgatattcttgcttaccagtatgatttagtctgcaacggcgtagagctttcatcaggcgctgttcgtaaccacgatccagagattatggttaaggcattccagttagttggtctcggcgaggaagatgtaaaggcaaaattcccggctatgtataacgcattctgctatggtgctccgccgcatgcaggaattgcaccaggtgttgaccgtatgatcatgctgattgcaggtgaggacagcattcgtgaaattattccattcccaatgaataagaatgcacaggatgttatgatgggcgcaccggctacagtaagcgagaagcagctggcagatgttcatattaaaatcgtagaggacaagaaagacgagtaa

SEQ ID NO: 2475 - DNA, 2223 bp, unclassified Clostridiales
gttgcctgcatgacaggcaggggagagatggatatggaggaaaaaaataagccgggtgaaacggtaccggagccgggtgaatctgagagaatatcggcagagagaaaagctgctttgcaggatatagacagaaagcgcgaggagaaggaaaagcttcgtcagacgcaaaagcaggaggctgtgaaagtacatggaagcttaagtgcgtatatgaactggccgctgcttgtatgtattgcgcttttgattctaagcatcattatcactatgattgactggatggctggtgtggcggcaagtgcctgctcaattgttctgatcataggtcttatggcgctttcaatctattatcaccgcagaattaacagcgacatggttggctttggcgcaggttatgcccagattcaaaagcagctgctccaggaaatggaatttccatatggtgtagcagatgagactggccgtctaatatggatgaatcagtcatttcagcgaattgttcagctaaataacaatgcacataaaaacttgggtacgctgtttccgggaatcgacagacagtttccaaagaatcaaagaacatcacaggtccattcggagtatctgggaagaaaatatcagatcacgattaaggctgtgtcgattcgtgatattgtggagacggttgttgatgaagaggatcagggaaaaaaggcaccaatgatgtatgcagtgtatttgtcagacgagacacagatgcttgagtggaagcagaaggttgaggatgaaaagcttgttgcggcgctgatttatcttgataactatgatgaagtcctagattccatagaggagacgagacgacctttgctgatagcgctgattgaccgtcagattacaaagtatatcagtgcttatcatggtgttattaaaaagctagagaatgataaatattttgccatcgtcagcaacgagcatttaaaagagatgcaggcaaatgatttttcacttcttgaggatgtgaagacgatcagtatcggaaacacgataaatgttacgattagtatcggacttggcataaacggcggaacgtattcgaaaaattatgactacgcgcgcatggcaattgacatggcacttggacgcggcggtgatcaggttgttcttaaaaatcaggatgagatcacctattatggcggtcgtacacagagccagggcaagaatacgcgtgttaaggcgcgtgtcaaggcacaggcgttaaaggagcttatagaggcatcttctgatgtgctgatcatgggtcattcaatcagcgatgcagattgtattggtgcttcagttggtatttatcgcgcagccagaacatctggtaaggatgttcatattgtgctgaatactattgcaaacagcataaaacctcttctaaatcgtcttgccgaggatgaagaatatggaaagaagctgtttattgataatgagactgcaattcagaggataacagaaggaacacttctgattgtggtggataataacagaccaagccgaacagagtgtccgcagcttttgcagttagcacagcatgtggtagtgcttgaccatcatcgtcagtcgcgtgactgtattgagggtgcagtgcttagctatgtggagccttatgcatcatctgccagtgagatggtggcagagatattgcagtattattcagattcaatcaagattcgtccgactgatgcagatgcaatgtattctggaattgttgtagatacaaataatttcatgaataatacaggtgtcagaacgtttgaggcggcggctttcttacgtcgaaatggtgccgacattacaaaagtgcgaaagctctttcgtgatgatatggaggattacaaggcaaaggcagaggccgtgcgtgaggtggagatgttccatgagcgctatgcaatcagtgtatgtccaagtgacatgactggaaatccgacagttattgcagcacaggcagcaaatgagcttttgggtattcgcggcattcgtgcatcatttgtgatgacagaatatgaaaatcagatttatattagtgcccgttctattgatgaggtaaatgtacagaccataatggaaaagcttggcggaggcggtcatatgaacgtcgcaggtgcccagcttcgcaatgtcacacttggagaggccagaagtatgttgaaggatgtgcttatggctcaggaagaaaagggtgacgaagtgaagggctga

SEQ ID NO: 2476 - DNA, 2463 bp, unclassified Clostridiales
tacaaaattcagattcagcaacctgaaaatacaagatgtgaaaggattaaaaaaatgaagtggcagagagttaaatatcagccgaacacaccacttggtgcaaacggccagaaggtaacagcaagcaaggcacatactgagctttccaagcaggtagcaaaggaaggtatggtattattaaaaaatgagaacagtcttcttccatttgagaagggcacgaggcttgccgtattcggaaaggcaagtgcagattatgtaaagggcggcggcggaagcggcgatgttaccgtttcatatacggtaagtcttgatgcaggtttaaaggcacttagcgattatgtaagtgtatatgaaggtttatcgttattttataataagaacgtgcgtgaccagtatgaaagaggcgtggctccaggcatgactgttgagccagaagttccggctgagcttttaaagaaggcaagagcttatactgatacagcacttattacgatttgccgtttttcaggcgagggatgggatagaacaagcagctacgacaatggcgtagagtcaggcgagccgatgtggaaggagtctcagaaggtatttgaacgaggagatttctatctgtctgatgcagaacagcgcatggtagagacagtaaaggctgcattccctaaggttgttgttgtattaaatgtaggcggtgttgtagattccatgtggtttgcagaggatcctaagattcagtctgttttaatggcatggcagggcggtatcgaaggcggtgcagcagctgctgaacttctttgcggtattggaagtccgtctggaaaattggcggatacttttgcgaagacgcttgaggattatccatcatcctacaacttccatgagtcacaggattacgtagattatacagatgatatttatgtaggatatcgttatttcgagactattccaggcgcagacaaaaaggttgtgtatccatttggatatggactttcctatacgacattcaagtgggagcttgagcgtgtagacgaggcagaggatggcacaattacagttcgcgtagaggtaacaaatactggaaatcatgaaggaaaagaagtacttcagctgtacggcagtgcaccaaaaggagcgcttgataaaccgtcaaaaattttgctttcatatgcaaagacaaagctgttgcagcctggagaaaatcagcttgtaactttagttggaaacgtaaatgatctggcttcatatgatgatcttggcgttctgcataaatctgcatatgtgatggaacagggagagtaccacttctatcttggaaattcagttagaaatacagaggagcttggatttatacatacagaagagtctacaagagtggcagagcagctgacagagtgcttagcaccgacatcacttccaaagcgcatgcgtgcagatggaagctttgaagaacttcctgtaagaccatcacacgatccagacagcgaaggacttcttacaaagaaggaaaaggaagcaatcgatggtgttgcaccagatgtacgtttttcaaagggcgagcatctttggaacaataacgagcgccgcatgcagtttgagcaagttgcagaaggcagcgtaacgcttgatgaatttgtggcacagttaagcgacgaggagttagctcatcttttaggcggtcagccaaatacaggtgttgcaaatacatttggctttggtaatctgccagagtgtggtattccaaactttatgacagctgatggaccggcaggacttcgtattttgccagagtgcggtgtttgcacaacagcatggccatgtgcaacacttcttgcatgcacctggaatccagagattgtctatgaggtaggtgcagctggtgcaaaagaggtaagagaaaataatatcgcagtatggcttacaccggcaatcaatattcatcgtacaccgatgtgcggaagaaactttgagtattactcagaggatccgtatcttgttgcaaagcaggcaggcgcaatggtacgcggtattcagtctcagcacattgctgcaacagtaaagcattttgcactgaataacaaagaaacgaaccgtaaggattcaaactcaagagtatcagagcgtgcagcaagacagatttatttaaagacatttgagcgtattgtaaaggaagcaaagccgtggtgcatcatgtcttcctataacattgtaaatgattatagagcttccgaaaatcatgatctgttagagaagcttctgcgcgatgagtggggatttgaaggtgttgtaatgacagactggtggacatttggcgagcactgcaaggaagtaaatgccggaaatgatgttaagatggcagctggaaatcctgacaacttgctgaaagcacttgaaaaaggtctgttaaagagagagacaatggagtgcagcgtaaagagacttcttggagttctcttaaagattgattaa

SEQ ID NO: 2477 - DNA, 2280 bp, unclassified Clostridiales
atgaatccagaagaagaaggattaatcccgccaaaaccttcggttaaggcaccggctaattttacatcgccggatgaattatataaagaattggaggatagtgtcagaaagtatcatccatcggatgatctgtcactgatccgcaaggcttatgaggttgcactaaattcgcacggagatcagcgcagacgctccggagagccgtatatcatccatccgctttgcgtagcaattatattagcagagctagaacttgataaggaaagtattgcggcaggacttcttcatgatgtcttagaggacaccccgatgactctaaaagaattgatcgggcttttcggagaagaaatcgcatttttggtagatggcgtaacaaagctgacgcagatcaactgggatatggataagattgagatccaggcagaaaatcttagaaagatgtttcttgctatggcaaaggatatccgtgttatcatggtaaagcttgcagaccgtctgcacaatatgcgtacgggtcagttctggaagccagagacgcagaaacaaaaggcaagagaaacacttgagatctattcgccgcttgcatcacgtcttggtatttctaaaatcaagacagagcttgacgatttgtctcttatgtatctgcaccctgatgtctataaggaactgacagaaaagatttacagcacgcaggatgcgcgcgagcgttttatagatgaaatcaaatctgaggttgcggtcaagcttgaggaggctgaaattaaggctgagatttcaggtcgtgttaaacatctgtttagcatctataaaaaaatggtaaatcaggataaaacacttgatcagatctatgatatttttgcagttcgtattattgttgatacagtaaaggactgttatgccgcacttggtgttattcatgaaatgtatcatcctattacggttcgttttaaggattacattgcaatgccaaagccaaatatgtatcagtcacttcatacgactctgattgcaaagaatggtcagccgtttgaaattcagattcgtacctttgagatgcatcgcactgctgagtatggtatcgcagcacactggaaatacaaggaacgcggttcgggagacactacagtgcgtgatgaagaggcaaagctttcttggcttcgtcagattcttgaatggcagaaggatgtttccgataataaagaatttatcagcatggtaaaaaatgatcttgatttattctcggataatgtatactgctttacaccgcagggtgatgtaaagaatcttccggctggatctacaccgattgactttgcttacagcattcactcagcagtaggaaaccgcatgaagcaggcggcagttaatggcaagatggttcctcttgattataagattcaaaatggtgatcgaatagagattttcacttctcagaatgtcaaaggacctagccgtgactggttaaatatcgcaaagagtacacaggctaaaaataagattaatcagtggttcaagcaggaaggacgagctggaaatatcaccagaggaaaagagcttgttgccagctgtgccaagggcaagggttttgagatcagtgatctgacaaagccggagtttacaaagaaggttatcacaaaatatggcttccgtgattgggattctattttggcagcagtaggacacggtggacttaaggaaggccagattgtaaacaagctgattgatctttatcaggaatctaagaagaaagcaccgacagatgagcaggttttggcgtctgtaattgaaaataataagaataagccagtcaagattcgcagtacaaacggcgttttagtcaatggtgttgttgatgttaatgttcgtttttcaagatgctgttcgccagttccaggtgatgagattgttggctttattacaagaggacgcggtatttctattcaccgtacagactgtgtaaatgtcatagctcttccagagtctgaaaagtcacgtcttgtcgatgttgagtggcagcaggaaagctttcattctaatgagaagtttatggcagagatcaagatcttctgtaacaatcgtattggtatttttgcagatatctctaagatttttacagagcgagagattgacattgcttccatgagttctaagacaagtaagcagggaacggcaactatcaacatgtcatttgaagttggcggtgtagatgctctgcagcagcttatcaatcgcctgatggcagttaacagcgtaattgatattgaacgttctaatggataa

SEQ ID NO: 2478 - DNA, 3036 bp, unclassified Clostridiales
atggcgaatcgtatcaataagattatttcgacaaaggcaaatacattgtatgcgatgaaaaacctgatcaaaaaggcaagcattgaggaaatgtatatccttagagttgaagacttctggcgcaataaaaatcaagtctgcacagagattatggaaaaatttggtggctgcagaatcgttgtgcgaagctcctctacgcaggaagactgtatgaagtcctctaatgcaggacattataaaagtattcttgatgtagattcagcgagtcgtgcgcagatcgtagaatcaatcgaggctgtaattcagtcatatgaaaaagatataaagggtatttcaaatgagcaggtactgatccagcgccaggcaatggacgtgtgtgtcagcggtgttgtcttttcacgtgacttaaaaggaaagagaccatattatcttgttaattacgatgacttggggtcaacagacagtgtaacaagcggtcgtggcggcaaaacgctttggattgcgagaaatgtttcactttatcagcttgaggagcgctggcgcaatttgattacagcagtaacagaagtagagagcatcatagaggatattccgcttgatattgaatttgccatagacagccataatcaggtgattctatttcaggttcgtccgcttgcagcaggctatcgtgaaggacgttatattgatgattattctttctttgcaagaaagggtcagattcgccgggagtatgaggagcaccttgatgcaattacaggaaagccgatgaagctttctgatatggctttttggaatccatctgagatcattggaagcaatccaagggcgttagattattcactgtaccgcgagatcataacgcatcatgcatggaatgaaggaatccgtacattaggctatcgtgcatttaatgaggatcttatgtatcaggttggaaataagccatatattaacttgacatattcctattattcactgattccagcaagtattccggaaccgctcgcacttcgtcttattcagtattatcagacaaggcttgaggaagacctttctgcacacgataaaattgagtttgagatcattttcagcagctatgattttatgacggaggaaaattcaaagagattgcttcgttatggttttaccgaggaagaacgtaaacttcttgtgcgcgaagtaaaaaagcttacgattgatgctgtaatgaatcaggaaaagattttaaaagaagatcttgaagcactaaagcgtcttgaaaattgccgtgaggaaattgaaaagttgttgtaccaagatgtgtcaattgacagaatcatcgacagtattttgactttgttaaaagaaattcgcacaaatggtactccgcaatttgcccgccaggcaagacttgcctttatcgcaagagcatttcttcgcacgcttgtagatgctggctactatacaagcgaaaatgtggatactttcatgcagggaatttctacagtatcatcagaatttaacgatgattttgagcgcttttctgagggtcttataagccgcgaggagtttaactttaagtatggacatcttagaagcggcacatatgatattcgttcagaccgctacgatgcgatgaattttcgccctgcgccatcgcgtattaaaaaagataaggtaaagattcaaaaagatcttgatatcagtattttgacgcaggctctggaagatacacagcttgatgtgcctgcagagcgtatggcaaaattttggattagcgcaattgaacagcgagagtattttaaatttgaatttacaaaatcgcttagtatggtattagaactgattcgtaagcttggctcaattttggagattcgtactatggatttgtcttggctgtgtgtagatgactttaagctatatgagtcaggctgtgatccagaaaatttaaaaaagctttggatgaagctaatcacaaagcggcgccgtttaaatcatgacagccgattaattcttcttccagaagttattttgtcaggtgcgagcgtagatgtgattcctgtgtatgaggcacgccctaatttcatcacggcaaagacagtcgagggcgaggtagtgttgcttgatgaggagccggatgctgatatcactggaaaaattgttgtagtgccaaaggctgacccaggctacgaatggatttttacaaaaaatatcaaaggatttatcacaaagtacggtggtgcagcttctcatatggcaattcgctgcgcagaatttaatattccggcagcaatcggctgcggcgagaaaatttacgatacagtatcacagcttgactatttggagatggactgcagaaatggtctgatcaaggaaggcattcaatatacaaatctccatgcacttatcacgcagagagagggtgtcaacgattacggagatccaaccgatatactagaggctggatatgttgaattttatgagtctattggttttattccgcgtcctgttgcaaaccatactaaaaacttcgagcgtttgtttgatgaaaaaatagatcttttgattgtagttggcggcggtgcacttggaccgcagtggtatgaccgtaaacatgaggaaacggtacagccataccgtgataagatggaagaaaagcttattcactactgtgttaatcatggaataccgattataggtacatgccgaggcatgcagtatgtgaatgttctattcggtggaaaactggcatatcatcctgatctgccgtgtcctagagagcgcggtgaggatcataaggtacgtttgctaaaagaaaatcgaagcatttacgttaacaattatcataaggatgtcattttcgaggatgcacttgcagactgctttgagccgcttgcaatagatgaagataatcacaccatcgaggcatatcagtctgaacagatgaagattttaggtgttcagtggcatccagagcgaaaatttggccatgcggatggaattgatgagacgcgccgtctggtaagagattttatctcgaaatttattcattaa

SEQ ID NO: 2479 - DNA, 1773 bp, unclassified Clostridiales
atggccgctgatgtaaaaggaatcatctacggtattaacggaccagttatctatattaaaggaaagactgcttttcgtatgggtgaaatggtttatgttggaccgcagaaactggtaggagaggtcattcgtcttgacagttcaagaacgaccattcaggtttacgaggagacaacaggattaaagccaggcgatgaggtatattcaacaggtgcagcaatttctgtaacactggcacctggtatccttcataacatctttgatggtatagagagaccgctgagcgagatcgcaaaggccggtggtatgtatatcacaagaggtttaagtgtagacgcacttgaccgcaacaaaaagtggcaggcacatattacagtaaagccaggacagcatgtatttggcggaacagtaatcgctgaggttcaagaaacaccaatgattgtacacaagtgtatgcttccgcctgacactgagggtacagtagagagcgttgcaaatgatggtgaatacaccattgatgagactattgtaacgatcattcagaatgatggaacaaagaaagaactgtctatgactcagaagtggccaattcgtgtgccaagaccaactaataagcgctatgcagcatcagagccgcttattacaggacagcgtattcttgatacattgttcccaatcgcaaagggtggtaccgcagctattcctggtggatttggaacaggaaagacgatgactcagcatcaggttgcaaagtggtctgatgccgatattattgtttatattggatgtggtgagcgtggaaacgagatgactcaggttctggaggagttttcagagcttattgacccaaagagcggcaatccacttatggatcgaactgttttgattgcaaatacatccaacatgccggttgcagcgcgtgaggcaagtatctacactggactgacactggctgagtattacagagatatgggttaccatgtagccatcatggcagactctacatcacgttgggcagaggctcttagagagttgtcaggacgtttggaggagatgccggccgaggaaggtttcccagcttacttagcatcaaagctatctgcattctatgagcgtgccggcatgatgcacaatttaaatggaagtgtcggaagtgttactattatcggcgctgtttccccgcagggaagcgatttctcagagcctgttacacagaacacaaagcgttttgtgcgctgcttctggggactggacaaatctcttgcttatgcaagacatttcccggctatccattggctgacctcatacagtgagtatgtacaggatctggcaccatggtataatgcaaaggctggaaaggatttcattgcaaacagaaatcgcctgatggcaatcttaaatcaggaaagtgcattgatggaaatcgtaaagctgatcggttctgatgtacttcctgatgatcagaagctgacgctggagatcgcaagagttgttcgtctgggatatctgcagcagaatgcattccacaaggatgatacatgcgtgccgattgaaaagcaggcagcgcagatgcgtgtcattctctacttatacgaccgtgctagatcactagtaacgatgggtcatccgatgagcgtcttaaagcagagcaacatctttgaccgtgtcatcaatatcaagtatgatgtgccgaatgatcgtcttgatatgtttgatcagtatatgaaagatattgatacattctacgatgaagtcatcgagaaaaatgcgtaa

SEQ ID NO: 2480 - DNA, 2124 bp, unclassified Clostridiales
atgaaaatgaacgatttagtacacaatgaggaacgtcttaaacagcttcgcgaacgcgcgaaagagctgattggacaaatgacacttgaggagaaggtatatcagacactttataacgcaccagcaattgaacgccttggaattgcttcttacaactggtggaatgaggctctgcacggtgttgcaagagccggcacagcaacagtttttccacaggcaattggtttggcagcaacgtttgatgaagatttcatggagcagattggtgatgccgtatctacagaggcgcgtgcaaaatttaacatgcagcaggagtttggagatcatgatatttacaagggcctgaccttctgggcaccaaacgtaaatattttccgtgatccaagatggggcagaggccatgaaacattcggtgaggatccgtatttgacatcacgtcttggagtgcgttacatcgagggaatgcagggccatgacgaaaaatatctaaagacggcagcatgtgcaaagcattttgctgttcacagcggaccagagggtatgcgtcattattttaatgcagaggtgtctaagaaagatctctatgagacatatcttccagccttcaaagcatgtgtacaagagggtaaagtcgaggctgtcatgggcgcttataaccgtacaaacggagagccatgctgtggaagcaagactttattaaaagatattttgcgtgatgagtggggctttgagggtcacgttacatcagactgctgggcaattaaagatttctatgaaggtcataatgtaacaaagaatgcagaggaatctgttgcattggcaatgaataatggctgtgatttaaactgcggtacgctgtttgtttatcttcttgatgctgttcgcgacggtcttgtaaaggaagaacgtcttgacgaggcacttgtcaatctttttacaacacgcatgaagcttggcgtatttgataaggcagacgataatccatacaataagatttcctattccgttgttgattcaccgaagatgcaggaattaaacctcacagcagcaaaaagatgtctgacgctgttaaaaaatgatcagatgcttccgcttgataaagaaaagatccatacaatcggtgtcattggaccgaatgccgacaatcgcatggcattagtaggaaattatgagggaactgcatcacgctatgtgacagtcttggaaggccttgaggattatgcaaaggagcatccaagagcagacggcgagaagatgcgcattgtttattcagaaggatgccatctttacaaggacagaagcagcaatctgactcagagccgtgaccgttttgcagaggtgaagggtgtttgcaaggaaagtgatgtagtagttgtctgccttggtcttgatgccagccttgaaggcgaggaaggcgatacaggaaatgagttttcaagcggcgataagcttgatctgcgtttcccgggtcttcaaaatgaagtacttgaagtggcatacgagagcggcaagccagtaatccttcttgttctgacaggaagtgcaatggatctggcatgggcagatgagcatgtaaatgccattatgcagtgctggtatcctggtgcacaaggcggaaatgcaatcgcacaggtactctttggcgatgcatgcccagaaggacgtcttccggttactttctaccgcacaagcgaagaactgccggaatttacagattacagcatggaaggtcgcacataccgttacatgaaaaataagccgctttatccgtttggatatggtttgtcatatacagagttttcgcttgacaatgtgaagcttagcacacaaaaggttacaccagatggtgttgaagtcacagcagatgtaactaatattggacagatggatggtactcagaccgtcttagtatatgtaaaggcagaacgcgaaggaacaccaaatccgcagttaaagggaatcgcaaaggcagctcttaaaaaaggtgagacaaagacagttcacattacgctgccagaggaagcatttggactttgtgatgatgatggcgtaaagcgcgttcataaaggcagctatacgatttatatcggtgaaaaggcagcaggcactgttgtcaaagattaa

SEQ ID NO: 2481 - DNA, 3483 bp, unclassified Clostridiales
gtgacaggaatcagaaagaatggcgttacaaatcaggaaggaaaaaagagcatggcacttcagtttatttcaggaaatagtatatcggaccgcacggcggtaatgtacgagacaatctgcgcacaagcatgcagacatccagataaaaattatatatttcttgtgccggagcaggcaaccttgcaggtgcaaagagagctttcagccgttcatccagatcatgtgcttggaaatattgatgttgtgagctttggcagactggcacatcgtctcttgaatgaacaggcaggaaagcaggcagtactgcttgatgatacaggaaagtcgatgattcttaggcgaattgcaggaaaggaaaagcaaagccttgaggtatttggacgcaatttaaatcagagcggttttattcaagagctaaaatcagtgatcagtgaatttagtgcctacaaagtcacctcagaagttttagagggagttcttccaacgcttgaaaagcgtcctgctcttcaaaaaaagctgcgtgatattgaaaaggtctatacttcattttataaggagcttggagaggaatacttaacagcagaggagcttcttggcgttttgtcacgtcttgtgccgcagtcagaaaaaattcgcggaagtataatcatattagatggctttacaggttttacaccgctgcagtatcaggtattagaggaaatgctccaatgcgcagagcatgttgtatgcgctgttacagaggatgaaaagggtggccgggaagaattgttctctatgagccgcgagatgaaaaataagcttttggcgcttgcaaaggaacatcatgtttcatgtgaggaaaaaaatcatcgttacgtgacaaaaaaacgaaaagtggctgaagagcttgcacatcttgaaaagcagctttatcaggtaccgccgaaatcatggaataagcagacagatgcagttaatattattgctgcgaaaaatccatcagaagagcttggttttgtacttagaaaagttttgtctcttgtgcgcgaaggatatgcgtaccgcgagattgcagtagtcgccggtgatttgtctgtttatcgtgatgaaatttcacatgtatttgatcaggctggcattccttattttatcgatcagaaaaaaggattaaatacacatcctttgattcaatttgtaaaaaaagctcttgctgttttagaggagcagatgagctacgacagcgtgatggcatttcttcgaaatccatatgtagtaagcgatgagaatacatttgacggagacattctctgtgaggacttagaccgccttgacaattatctgcttgcaggcggtattgagcgaataaatagatggaagcatccttgggttatgccatatgacaatgcagatgaagaagatttatcacgtcttaatcagcttcgtgagcagatctttaactggtttgtgccgcttcgcactgtctgggaaaagcctgatacaactgtgcgcgaggctatgacatctcttttttcattcatgcagcaatttgatatcgcatataagctaaaagtacagcaaaaggcttttcgtgaatcaggagagaaatacttagcaagcgagtatgagcaggtctatgcaaaggtacttggtctgtttgatcagatcgtagagctgatgggtgatgaaacattagaggtgcgtgtgctgtcagatattttagattccggcttcgaggaactttcggtcggcttcattccagctgctgtagatcgtctcgttgtgggagatttgatgagaacgagactagagcatattcgtgtactttttgtcattggctgcaacgatggactgcttcctaagcgcgcagatagaggcggcattctttcagattatgacagagagattttaaagggcgccggtatggagctggcgctcgcagcgcgcgaggaagtattttgccagcaatactatttgtatctgcttttaacaaagccgtctcaaaagctttatgtcagctttagtgagacgtcagcagacggaaaagcacttcgccctgctcatttaaaaaatgtgatcacaaagctgtttccaaaatgtcagacatatgcggcagaagacgcgtatcaaaaactagagggactgatgcaaaaggaagacggtttcctgcttcttataaatggtcttcgcagctacctggatggcgagaaagagatgtggtggcaggagctttatcgttactacattgaggatgaagcttttaaagagcgcttagatattatgcgcgaaggacttttctatggctacaagacagaaaaattagacaagcaaatcgcaaagaagctgtttggcggtgatcatgagatttctatttcacgtcttgaaaaatatgcagcctgtgcatatgctcactttttaacatatggccttcagctaaaggaacgtcgccagtttgagcttggagcagctgactacggaagcctttttcatgcttcaatcagtcatttctttgagcttcttgaaaaacgtcatttaaattggagagagattacagacacacagagaaatcagctcgtcgaggagagtgtagcaaaggctatggaggaataccagacaactgttttcgacagcagtgcgcgaaataaatccatggcaggacgcatacgacgaatgacagacagaacactctgggcgcttggctgtcagtgggagcatggtgcttatgagaagacatggcacgagcttgattttggaagagccggcggcaatggcgtgacgcttccagtcgaggaaggcttagagctgtcgcttcgaggaaggattgaccgtgtggactttgccgaggaagacggttcactttatgtaaaagtcatcgactacaaatcaggaagtacaaagcttgatcttggaaaagtgtattatggactgcagctgcagctagtgctttatttagaggcagcaatggctatggcggcaaaaagaaatcctaaccgaaagcttattccggcaggaatttattattacaacatgaaggatcctattgtgtcaggctttgatatgacaaaggaagagatagaagcaaagcagcaaaaggagcttagaatgaatggccttacaagcacagaaaaggcatcgcttcttttgattgacgcagaaggcggaaatgtcgtgtctggattggagtacaaaaaagatggcagtctgtcctcacgcgcacttgtagcaaatgcagatcagatgcatgagcttggtcactttgccagaaaaaaagcactcgatctggcacgagacatttacggaggaaagattgacgcttatccgtatgaatataagaagatgaatccgtgtgaatactgcgagtatggttctgtctgcggctttgatctgcagcttgagggatgtcattaccgcaggctttcagcgctagacaaggatgaggtatggcaggaaattgcgcgagaggaaaataagcagacagacaaagaggagagggaagatggctga

SEQ ID NO: 2482 - DNA, 2037 bp, unclassified Clostridiales
atggcatttgtaccaaaaacattggattacacagtaagcccatatacgggactgacacgtcagtcttggattgaggcaggaacgtatctattagagggcgtatttcaaaacattgctcactttgaggatccagttgttatgcctcgaaaagagacaaaggtaacttacccacacagcgctgacgctgtatgggagtttaaggcagagtattttgagggacttgcacgttccttctttatcgcagcaccgctgattcacgacaatccagacctgaatctgtgcggttattccattcgcgattattacaagtcacatgtacttcgtgcatgtacaaagggcgatccagtctcagtaggtcgctatgaggagcttcaggagatggctggcgattacaacagagcttttcagcagacagtagagacatgtgcacttgtcatttgtctgtgggtttgcaaggaggagatctgggatacatacacaaaggaagaaaaggatgtaatcgctgaatttttaagaggttatgcagatggaaatacagttccgcagaactggcgtctgtttaacatgctcgatatggcttttcttgacatggaaggctatgagattgatgaagaaatcatgcttgatcatgcacagagcattcttgcctactatgcaggcgatggatggtacagagatggtcattcgtttgactactattcctgttgggcatttaatgtttatgcaccaatatggaatttgtggtatggctatgagaagcagccgtatatcgcagcaaagtttgaggagcactccaataaattgatggaaacatatgcggatttctttgaccgtgatggcttcaccaatatgtggggcagaagcaatatttaccgtaacgcagcaacaagcgcttttgacggcaacttaatgcttcataacagcacagccgatccaggtctggcaagacgtatttcttctggctctttgcttcagtttatgacaagagatgacttcttatttaagggtgttccaacacttggattttatggtcagtttacacctcttgttcagggctactcatgtgcagaatctccattctggcttggcaaagcatttctttgtctgcatctgccggcagatcatccattctggacagcaacagaaaataatggtacttgggagacacttggaagcaaaggcaccaaggttacatcattaaacggacctgcactttgcttttcaaatcatcaggcaaatggtgagactattcttcgtactggaaaagtagtaaagaataaaaaagatgagcatggcatgtggaactattcaaagctttgctttaacaccaagtatccgtgggagtcagctgttgcaccagatatcgaagcacagcagtatgttctttatgatggtgtttcagatgaaattaaaaagggaaatgtaacatattggcacggtcttaaaaatgacgtgttatatcgccgtcagttctttaactatgatttagagaatgagtgtcactggattcaggcaatgaatctggctgattttacagtgccttatggtgttatccgtgcagacaagcttcgtctgtttagctgtccgattcgcctgacacttggatcttatggtttcccggacaatggaacacagatcatcgaaaagactgcagattgtgcaaaggcaattatcttaaagggtcatgatcataccggaagagaaaagcagatggcaatgacaatttatgatggatgggatgagttagagattgttaagagcacaggaacaaatccagattcagagaactctatcgtgatttatgcaaaaactgcaagagaaaagaaatatggctatcagccgtatgtacttatttcacaggttatcacaaaggaaagtcttgaggatttcacagacgatgagattttcccaattgaaaaagtacattatacagatacaaagaagtgcggaggctacggccctgtaaccattacactaaaggatggaacaacacgcactattgattttgaaggtattgagggacagctgattagataa

SEQ ID NO: 2483 - DNA, 2025 bp, unclassified Clostridiales
ttgattgcctgtgaagactcaggcggaaggagaaagaaaggaatgagttttaaggaaaaggccgtttcatggcggcaggaggtacatatcggcaagacaaaaccacgtctgatcaaggcggcaatattgttgctttgttttggcgttctgattggcatggcttggtattacagtgaattttctgcaaaagattgtgcgattcttgcaggtatttgtgtgctcactctcgccatatatatgattgatatgccagtgcatccagtgatccgcattctatttgcacttgtcatcccgttaggctgtttttacacatttgagacactgactcatcagatgagtaccatgattgagctggcaaagcggcttaatattgcattttactattggttatttttatttgtgttcttcatagctgggcgaactagcatttcaatggccatctgtgtgtcagcaattgccattattggtgttggcaactattttgttgttatgtttcgttcaaatcctattgttccatgggatatatattcctttgaaacagcaatgagtgtggcagacaactacgtcttttcagtagattgggcgcttgcagagcacattgcaatgtttattttaatgttaattgtcggtgtgagaaccaatattcgtctgaataaaaaaatcctgcgtccgattcttactgtggctatgtgtattccggcttatttttatatttcatatttatggcaggacaatttagagagaaatacaggattaaatgatactttgtttaatgcaaagtatatgcacagtaaggatggcttttttgtgtcattcattttggacatccattttcttcagattgaagagccaaaaaattactcagatgagtatgcattatctctgctaaatgaacaggaagtggaaaaagtggagacaccagaagaactgccagatatcattgccatcatggatgagacattttcagatccggcagtgcttggtgagtttgagacaaacaaagattatatgccgtttgtccatagcatcttaagaggtgaagtagccaatacaatcagtggttatgctgatgtttctgttcttggaggaaatacagcaaactctgagtttgaatttttaactggaaattccatggcatttttcccaaatggatcagttccatatttacagtatatacgtgatggtatcagcacaattgttcctcagttagaggagtatggttatacgacatatggtacacatccataccgcgcaaagggatggaatcgtgagttcatctatgatcttatgggctttgactatcgttatttccagggaagctttccatttgaggacaagcttcgcaactatgtttctgatgaagctgattttaagagtattttagagtggcgcaacaacacagaaggaccattctttatgtttaatgttactatgcagaatcacagcaactatggcggtgattttgataactttgatccgcagattgttgctaagtttaagaatacatattcaaataaatatctgaacaaatatttgtctttgatgtacgaaacagatcaggatgttgcatcacttttaagtgagttatctcagtcagatagaaagactattgttgtgttctggggcgatcatcagccaaatgattatgtggttcgtccaatttacaaagagtatggccttgattttgacaatcagacatacgaacaacagcagcagcgtcagaagacgccatttttcatctgggcaaattatgatattcaagagcagacaaatgtagagatcagcttgaattacctgaatattctgctgtttgagactgctggattacagcttgatgaataccagacattccgtaaaaatctgtggcagggtcaaattccaatgatgaatgcagtcggctatcgaaatgatgacggcgatctggtggagtacgacgatgcacctgaggaaattcagaatcttttgaatgagtatcagaatattcagtattaccgcatggagcgtgaatattcgaagaaaaagtga

SEQ ID NO: 2484 - DNA, 2562 bp, unclassified Clostridiales
ttgaaaaagctaattcgaaggattctgctgctgatttttatttttgcagctgcatttggcagctttgtagtatatcagcagtatacacagaaaacacagcagacagacagctacgaaacgatgcagtccagcacacttgccgctgtaaggcttaagtatcttacagataacagcaatattcttcgtggttatacacaaaagatggatgtttccacgatgaggggctgtattacgcccctgtcgcaggaacataaactgtccattcagatcgatcaggcggagaatgtcggtcaggtttcatatgaagtcagaggccttgatggcacacgtcttgtagaggatggtgtgataagcggatgggaaacggatggcagcactatgaagacacagctgcagctttctaatctggtagatgatggcaatgaatatcaatttgttttatgtgtcagtcagaaggaaaaacctgtctattattatagcagaattatttatctgacagatgaacatacagaaagcctcgttggttttgcacatgatttctggcaggcatcaattgacaaaaacagtgattttgtcgtcaattacatacagccagatgagacgatgggaacagatgatttcagctacgtgaatcagcattcaagaagtggtatgatcacgtggaatggtcttttagttgaggctggaacagtagagacaacgcttacggagttaagtgacagtcaggcaagtattacattgacatatcctgtaacaataagtaacggcacagacagcaaaacatgtatggtgaatgaaaattatgttgtgcgttttagaagtgatgtgctttatcttcttgattttgaacgccatgtaaaagaacagttttcggtagcagcaccagtgtatgcaaagggggcactgcagcttggcattacagatgaggaagtatccaagatggcatcagatgatgaaaatattcaggcatacgtgtatgacggacagctgtttgcatcaaatgaaaaagataattcattaagtcttatatacacatatcaggatggagctgaggataaatcatttttagatgggtacaagctgcagccaattcgtgttgaaaacagcggcgatatttattttatggcatatggttatcacagcagaggaaatcatgagggacaggttggcgtcagcttccttcattataaatgtgagacagcctgtattgatgaaatcttctatattccagttacattctcggaagagatccttatgaaaaatatgggaacgcttgcctatgtcaataatgagtctgatttgatgtaccttttgtatcagagtactgtgtattctatcgatttaagcagtggagagaaggcacagcttgctaaggcatcaagtgcaggaagcttttactccaataaatcaagcagccttattgcctgggaggagggcgatgagggatatgcaggcgtgattagaattgccgatctaagcactggagaaacgtatcgtatagatgcaggagaaggtgagtttgttcagattcagggctttttgggcaatgatctggtgtatggcacgggaagaaagagtgatgtgctgacacaggccggacaggtagtgcataagcctatgtatgaactggcaatactttcatttgatgaagacatgacacagtctggtgcatatcagatggatggatattatatagaaggaacacaaattttggagaaccagctaaacatttatcgtcttacgaagaacaatgcgtctggaagctatgaagaagcggctgatgatcagatgtttttcaataatcgaagcgataagaaggttacaagcttaacaaagagcaaaattgcagatgatttccagaaggtgtggtctattagtattcctctcgatacagaaaaggtgcagacaaatggaacactttgcaagattcgcgatgcagctgcctcatatcagttgaacttagatgatggtgatcaggggcatctttactatgtatatgccaagggacgcttacagcagattgacagtgtgcttgcagatgctattgacaccgcatatgatcagatgggagtagtggtagatgatagggcaagctatgtttggacaagaggaactagagcgctgagtaaaaatctgacatttgaagaacagcaggcaaaaaacgcagaagatggcttaagggcatgcttagagattcttatttcggctgaaggcggaaatgcatctttagtagaagcacttttgaatgagaagacggctgttgaggatattatgactcaggcaatagaggctgaaaacacaaaagatacgtcaaaaagtgtaagcggccgtgcagaaaatctaagaggcagcagtgtaacacagattttatattatatcaacgaaaatcatctggtgcttgcagttactggagacagcagtgcgctattgcttacaggctatgacacaaaaaatgtaagtgtgtatgatcccgttacatcagagactactacgatggcaattgctgatgcacaagaatattttgaggcatatgactgtgcattctttgcatggataaaataa

SEQ ID NO: 2485 - DNA, 1776 bp, unclassified Clostridiales
atgatggaaaagcagaagaagttttcactgaaaaactatctgtatgagtataaatggtggtatgtgtttggcatagcaattttgctttgtgtcgatctggcaaatatttatattccgcagtttatcggagatataattgacggactgacaaatgaaacgttgacaaaagccggcattccaatgatgctcatgaagatattgattgcaggactgattatgatgtttggccgttttggatggcgctactgtatttttggcgcatccagaaagattgaatatcgtcttagaaatgatatgtttggtcatttggaaacattgtcagcgcgttactttaatgaacacaaaactggtgatctgatggcgcattttacaaatgatttggaggctgtgcgagtggcagtaggtatggctgtcattacaacctttgatgcagcagtcatgtctattatggttattattaaaatgatcatatacgttgatctgcgtttgactgtgcttgcatttgttccaatgattcttgttgcaatcggatgttatttctttggtgttcagatgaaaaagcgccagactgccagacaggaagccttttcatttctttcagataaggttcaggagagtatttctggtatccgtgttttaaaggcctttgttcaggagaagaaggatcttgaggaatttcagaaggcaaatgaaaataacatggaaaaaaatcttgccgttgtgaagctaagaagtttgtttggacctctgcttgatttgattacaggaatcagtcttcttttgacattgatcattggaggaaaaatggtaattaatggaacggtatcagttggtcagtttgttgcattcaactcttatatcggtatgctcgtatggccgatgatcgcctgtggtgactgtataaatacatttagccaggcatcagcaggctataagcgtatcaaggatatcttcgatgaaaagccagatatcattgataaggtaaaagagaaggatggtgagcatttaactggtgatatagagctgaagaatctgaccttccagtatccagatggcgatacacctgttttaaagaatgtgagtgttcacattaaaccaggcgagatgttagcagtacttggacgaactggaagcggaaagtctacgcttgcagatctgcttcttcgtgtatatgactgcgaaaaaggaatgcttttgatggacggaagacctattgatgagattccgcttcatgtgcttcaccgtgatgtggcttatgtgcctcaggaaaattttatgttttcagatacacttgaggaaaatatagcatttggacttgaagatcgtattttcgatcatccaaagcttcgcgataatattaaggaagcagctgaggcggcctgcattcacagcaatattattgatttcccagaaggctatcagacacttgttggagagcgcggtgtaacgctttcaggcggtcagaagcagcgaagctctattgcacgtgcgcttcttaagaatgcccctgtattgattatggatgactcgctgtctgctgtcgatacagatacagaggagcagattttagagaatctgattcgtctgcgcaagggaaaaacaacgattattatcgcacatcgtgtttctacgctccaaaaggctgatcatatcgcagtattgactgagggtgagatgactgagtatggtacacatgatgagttaatccgcgagggcggcttctatgcaaagatttatgagaagcagcagcttgagcaggaattaaatgagatgtaa

SEQ ID NO: 2486 - DNA, 4677 bp, unclassified Clostridiales
atgaataagatgctgtatagtaggcacaaacaaagaaagaaaaagccagagagggcacggactgcaaagacgcagaacacctctctggctttctttgaaaaaaacaggaggaccaacatggaacagactagcaaaacaccttggggaactacagaaggtctgtatgatcccagttttgaacatgacaactgtggtattggtgcaattgtcaatattaaaggaacaaaaacgcatcagacagtagaggatgcattaaagattgttgaaaatcttgagcatcgtgccggtaaggacgcagagggaaaaacaggagatggtgtaggtattttacttcagatttctcatccgtttttctcaggtgtctgtaaagaacttggatacgacatcggtgatgagagagattatggtattggaatgtttttcctgcctcagaacgagactgaccgccgcatgtcgatgaagatgttcgagattattgcaaagaaggaaggcgtaacggtacttggctggagaatggttccggtcacaccgggtatcttaggctcaaaggcactcgactgcatgccatgcatcatgcagtgcttcttaaagcgtccgtcacgtgtggcaaagggtcttgcatttgaccgcaagctctatgtcatccgccgtatcttcgagcagtcaaatgataatacctatgttgtttcgctttcaagcagaactattgtttacaaaggaatgttccttgttggacagcttcgcaatttctacaacgatttacaggatgaagcttatgtttctgcaatcgcgctggttcactcccgtttctctacaaacacaaacccaagctggcagcgtgctcatccgaaccgatacatggtacataacggtgagatcaatactatccgtggcaatgtggataagatgttagcccgtgaggaaaaaatggagtcagaagaacttaaaaacgaaatttcaaaagttcttcctgttgtcgatgattcaggctcagattccgcaatgatggataatgtattggaatttttaattatgagcggcatgccaatggcacttgctgtcatgattctaattccagagccatggattaacgataagtccatgtcacagaagaagaaggatttctatcaatattatgcaactatgatggagccatgggatggaccggctgccatcgtattctccgatggtgatcagcttggcgctgtattagacagaaatggtcttcgtccgagccgctacatcattacatctgatgaccgtatgatcttaacatctgagatgggtacacttgacattgatccgtcaatcatcgtaaagaaagagcgtcttcgcccaggccgtatgctgttagtagacacagtgaagggacgcgtgattgatgatgaagagcttaagggttattatgcagcacgccagccatatggtgagtggcttgattccaatatggttcaactgcgcgatttaaagattccgaatgtgcgcgtaccagagtttacaagagaagagatgcttcgcttaatgaagaactttggctatacatttgagcagcttcgaagcatcgttttgccgatggcaaagacaggaacagagccgacagctgcaatgggtcatgatactccattagctgtgctttcaaagcagcatcagccgctgttttcatactttaagcagcgtttcgcacaggttacaaacccgccgattgactccatccgtgaggagatcgtcacttcaactaatctgtatattggatgcgcaggaaacatcttaaaggatacacctgaaaactgcaagattcttcgtatcaatgatccgatcttaacagacactgatttgcttaagattcgcaacatgaacatcgaaggcttcaaggtagcgacagttccgattacttattatcgcagtacttccttaaataaggcaattgatcgcctattcattgatgttgaccgcgctcaccacaacggggcgaacattattattctttccgaccgtggcgtagatgagaatagaattgcaattccgtctcttttagcagtctctgcgcttaaccatcatcttgttgttacaaagcagcgtacctctatgtctgttatcttagagacaggagagccaagagaagttcatcattttgcaacacttcttggatttggtgcaagtgcagtcaatccgtatctggcacatgagggaatcaagtatcttgtttccagccatatgcttgacaaggatccttatgcagcaatcgacgattacaacaaggctgttttaaatggtattgtaaagattgcagcaaagatgggtatttccactattcagtcatatatcagctccaagatttttgaggcaattggtcttgataaggatctggtagacaaatatttcccaggaacagtttctcgtatcgagggcatcagcttaaaggatattgaggatgatattgagagctggcatgcaacagcatttgatccgcttggacttggcgtagatctgacacttgacagcgttggtgctcataaggaaagaagcggtaaggaggagcatttgtataatccgcttactattcatatgctgcaggaagcaacaagaacaggaaattatgaactgtttaaaaaatactcagagagtcttcgcgatgatggaaatccgatgagtcttagaagtcttatggaatttaaattccctgaggacggaggcattccgattgaggaggttgagggtgttgacagcatcgtaagacgtttcaagacaggtgctatgtcctatggttctatctctcaggaggcacatgagacacttgcaatcgcaatgaatactcttcatggaaagagcaacagcggtgaaggcggtgaggcgttagagcgtcttacaatcggcaaggacggactgaatcgttcatcagcaatcaagcaggttgcttcaggtcgttttggcgttacaagccgctatctgacgagcgcaaaggaaattcagattaaaatggcacagggcgcaaagcctggcgagggtggtcatctgccggcaggaaaggtgtatccgtggattgcaaagacaagacattcaacacctggagttgcacttatttctccgccgccgcatcatgatatttattcaatcgaggatttggcacagctgatctatgatttaaagaatgcaaatgatcaggcacgaatttcagtaaagcttgtatcagaggcaggtgttggaactgttgcagcaggtgtggcaaaggcaggtgcacaggttattcttgtgtcaggctatgacggtggaacaggagccgcaccgagaaactcaatccatgatgctggtcttccttgggagcttggtgtagcagaaacacatcagtccttaataatgaatggtcttcgtgaccgtgttatcttagagacagatggaaagcttatgaatggtcatgatgtagtagttgctgctcttctcggtgcagaagagtatggctttgcaacagcaccgcttgttacaatgggctgtgtcatgatgcgtgtctgcaaccttgatacctgtcctgttggtgtggctacacaaaatccagagttaagaaagaacttccgtggaaagccagagtatgtaatcaactttatgcgtttcgttgctcaggaaatgcgtgaatatatggcaaaacttggtgtgcgcactgttgatgagcttattggccgtaccgatcttttataccagagaaaggattttgcaaataagagagcaaatgaggtcgatctgcaccgcatccttgataatccgtacagtgatgcatcagtagcaggctattatcataagaatgtatatgattttgagctggaaaaaacacttgataagagtgtactgattaaaaagcttatgccgtctgtaaagagcagccatgcaaaagcaattgatattcatgtaggcaatgtaaatcgtgcatttggtacgcagcttggtgccgagataacaagacttcatccagacggactgccagaggatacaattactgttcatgcacagggaagcggcggacaaagctttggtgcatttatacctaagggtcttacaatgacacttgaaggagacagcaatgactactttggcaaaggactttcaggtggaaagcttgtcgtattcccaccaaagaaggcagcattcaagccagatgaaaacatcattattggaaacgttgcgctttatggtgcgacaagcggaaaggcatttatcgaaggtgtggcaggtgagcgttttgctgtaagaaactctggtgcaattgctgttgttgaaggtgtgggtgatcatggctgtgagtatatgacaggcggccgcgttgccatccttggaccgacaggaaagaactttgcagctggtatgagcggcggtattgcttatgtgcttgatgagcacaatgatctctacacaagacttaataagtcactgatcagtattgaggagcttacaaataagtacgatgtacaggaattaaaggagatgatcacagagcatgcaaagacaacaggctctgcaaaaggaaagtatatcctggaacacttctccgagtatctgccgaagtttaagaagattatcccgaatgattataagcgtatgcttaacgccatcgttcagatggaggagaagggcttaagcagcgagcagtcacagatcgaggcattctatgcaaatgccggaagaaaataa

SEQ ID NO: 2487 - DNA, 2529 bp, unclassified Clostridiales
atgggcgacaacgaagaattatctgttgatcaggagactgtagatcagaaagtggatcagccagggattggtgatgagccgcagccgcaaaattccacagatgactttgacccgaaaaagcacacacgtgtgcagacaggagcaaatggagagctttgctttcagggattgacgcaggcagaggtagaagcgcgtattgcagacggacaggtaaatgtcattcaggattcaagcaaccgcagtgttaaagatattgtgatgggaaacacattgacgtttttcaactttatcaatatcgtgctgctggcactagttttatctgttcgctcctacaaaaacatgctgttcatctttatcatcatcgcaaatacgctgattggtatttttcaggaaatcaaggcaaagattacgcttgataaattgaagatcctgacagtaagtcatgtagatgtaatacgtgatggtgtgaaaaagtctataacagtttcagaactggtaaaggatgatgttattttgctaaagagcggaggacagattccagcggacggtgtgattttggatggagaggtggatgtaaatgaatctcttttaacaggagagtctgactcaatccataagacgtgcggcagcaaggtgctgtcaggaagctttgtgacatcaggaaaggcaatgtgtcttctgacagaagttggacatgattgttatatggaaaagctttcgtcagaggcaaagcagtttaagcgctataagacagagctgcagagaaatctggatacgatcttaaagtttatcagtatcattattgtaccgcttggcattatattatttgcaaagcagtattggatctcaggcagcacctatgagcaggcagcacttgatacagtagccgcagtgcttggcatgatcccagaaggtcttgtacttttgactagtgtggcgctggcacttggtgcagttcgtctggcgagacgaagcacacttgttcgtgagctgttttgtatcgaaactttggcgcgtgtagatacgctttgtcttgataagacaggaacaatcacagaaggtcatctttgtgtgcagggtgaggaatcagtaaaggaagacgttgatttagagcagctgatgggcagaatggttgcagcacttggcgatgaaaatgagacatttcaggcgcttcgtcagcattataagagaaaccagtcaacaaacacaaagcttgtgcttccattttcgtcagagcgcaagttcagcggtgttgtgtttgagggagaaggaacgtaccttatgggtgcataccagtttattttcctgcaggcagatccggcagtgcttgaaaagattgcagaatatgcaagtcagggtcttcgtgtgctgacaattgcgcacagtccaaatgagatgacagattatacgttagcagaggactttgagattgttggctttgttttcatgacagatgttgtccgtaagaatgcacctgacattttgggttattttgaggagcagggtgttgacttaaaggtaatctcaggtgatgatcctgtaacggtagcggcaattgcagcacgcgccggattaaaggatgccgacaaatatatagatgcgacaacgatccatactgatgaggaaatggaggatgccatcttaaaatattcagtttttggacgtgttactccaaagcaaaagcagcagatggtaaggcttctaaagcaaaatggccgtacagtagctatgactggtgatggtgtaaacgatgtgcttgcactcaaggatgctgatgttagtattgcgatggcatcaggaagtgaggcagcaaaaaatacagctaatctggtattgttaaattcagactttgcatcactgccacatattgtaaatgaaggacgacgtgtcatcaacaatatcaaggcagcagcttcaatgttcttaattaagacaggattttctgttttgacagcacttttgacaatcattgttggacagaattatccgttccagccgattcagctgtcagtcatcaacggatgtgcagttgcaattccaacgatgcttttgcagctagaaccaagctttcagaaggtcaacaagcatttcttcagagaggtgcttcgaatgtcaatgccggcggccattactattacagcaatgattactattataaacaatattggccattcaattggaacaccgcgtgagatgctttcaactgtatgtgtactggcaacgggatgggtttatctgatcacacttcgtcaggtatattcgccaatgacaggataccgcaaatttgttatttaccttatgcagacagcttaccttgtagcaatggtaattggtcagcgtattatggaactagttggattaaactttacatgcgttatagtcacattggcagcagtaaacttcgcaccaatgattattgatcttgcaacaaagggttatgataagtttttctattggtacgatcaccgccatgatgtcaagccgccaaagccgataaaggtaaagacaagacgatttagaggtgtataa

SEQ ID NO: 2488 - DNA, 3474 bp, unclassified Clostridiales
atggcatttacacatcttcatgtgcatacagagtatagtctgctcgacggctcatgtaagataaaggaattaattgacagagcaaaagagctggggatgcagtctctggcgattacagatcacggcgtcatgtacggcgtgattgatttttataaagcagcagttaatgcaggtataaagcccattataggctgtgaggtttatgtggcaccggaatcaagatttgacagagaagcaggcggacagggagatgatcgttattatcatctggtgctgttagcagaaaatgatacaggctatcataacctgatgaagattgtttcaagaggttttacggaaggctattattataagccgcgtgtagataaagaacttcttgaaaaatatcatgagggcataattgcactaagtgcatgtctggcaggtgaggtggcaagaaatgtcacaagaggtctttatgaggacgcaaaaaaagcagcgctttcctatgagaaaatttttggaaagggaaatttctttttagaactgcaggatcatggaatcagtgcacaggcaactgttaatcaggcacttcttcgtatgagtgaggagacagggattgagcttgtagcaacaaatgatattcattatataaatgcagaagacgcagagcctcatgatgtacttttatgtatacagaccggaaaaaaggtaaacgatgagaaccgcatgcgctacacgggaggccaatattatttaaaatctgagcaggaaatgcgtgatctgtttcgttatgcacagcaggcgattgacaatacagcaaaaattgcagacagatgtaatgttgagattgagtttggaaagacaaagcttccaaagttttctgtgccggatggctacacatcagaacagtatcttgagaagctttgccgtgaaggattggtgcgtcgttatggtgaggaggcatcacaggtagaaaaacgtcttgactatgagcttggtgttataaaaaggatgggctatgttgactactttttgattgtgtgggattttattcatttcgcaaaatcaaaagatataatggttggtccgggacgaggttcagcagcaggaagtgtagttgcgtacagtctggagataacagatattgagccgcttcgctatcagcttctgtttgagcgttttttaaatccagagcgtgtatctatgccagatattgatgtagacttttgcttcgagcgccgtcaggaagtaattgactacgttgtagaaaagtatggcaaagatcaggtcgttcagattgttacatttggtacgcttgctgcaaaaaactgtatccgcgatgttggacgtgcacttgatttgccatactcgctttgcgatatgattgctaagcttattccagctgaattaaatatgacaattgaccgtgcattaaatgtcaacccagagcttcggtctcattatgacagcgatccgcaggttaaaaaacttattgatctctcaaagaggcttgaaggtcttccgcgtcatacatcaatgcatgcagcaggcgttgtcataagccagcgtgccgtagacgaatatgtgccgctctcaagaggaagcgatggtgcagttgtcacacagtacactatgacagccttagaagagctaggtcttttaaaaatggattttctgggacttaggacgcttacagttatacaaaatgcagtaaataatgttaagcgaagtcagggcattgcattagatatcagtaacattgatatgaatgattcacaggtacttgcctcaattggaacaggtcactgtgaaggtattttccagcttgagagtgcaggaatgaaaaacttcatgaaggagttaaagccagacagtcttgaggatattatcgctggaatttctctatatcgcccaggtcctatggattttattccgagatatttagagggaaaaaataatccggaaaaaatcacatacgaatgcccacagttaaagtcaattcttgaacctacgtatggatgtatagtgtatcaggagcaggttatgcagattgttcgtgatcttgcaggctatacgcttggacgaagcgatcttgtgcgccgtgcaatggctaaaaagaaagcagctgttatggagaaagagcgtcagaattttgtgtacggcaataaagaagaaggtgttccgggatgtatttcacgcggaattgatgagaaaacggcaaatcatatatatgatgagatgattgattttgcgagatatgcgtttaataagtcgcatgctgcagcatatgcggttgtagcatatcagacggcttatttaaaatattattatcctgttgaatatatggctgcacttatgacgtctgtaattgaaaattctggaaaagtttctgattatattcaggtttgccgtaagatgggaatttcaatcgttccgcctgatataaatgccggtgagtgggatttttctgtgcgcgatggaaaaatctgttatgcattatctgccataaaaagcattggaagaaatgttattttagcgatggtgcgtgagagaaaagaaaatggagcatacacagatcttcagaatttcttagagcgcatgtatggcggtgagttaaataaacgagccgttgaaaatctgataaagtcaggtgcgatggactgcattgaaggcaacagaagacaaaaaatggaagtttattcctctattatggatgaattagccagagaacagaaacattctatgacaggacagtacagcctgatggattttttagagggtccgcagaaggatgactttaagatttcattcccaaaagtaccagaatatgagccaggagcacttctcgcaatggaaaaagaggtgcttggaatttatatcagtggtcatccgctagaggctgacagaagtctcatcgagaaaaatatcacagcagtcagcagtgattttattcaggatgaggagactggaatggcaagggtgcgagatcaggccattgttacggtggcaggaatgattgcagcaaaaacagttaagacaacaaagacaaaccaaatgatggcatttctgatgcttgaggatttacgaggaactcttgaggtgattgtttttccaaaagattacgaaaaatatcgcgcaattctcagtccagatcagaaaatttttgttaagggccgcgtgtcacttggagatgaggtgcagggaaaactgatctgtgaaaagatagtggcattttctgagattccgggtgagctgtggattcagtttcaagatcttgaaagctaccagatgaatgaaaagaagcttctgtctatgttggcaccgtgggatggaaaagacacagtagtggtttatctttccaacacaagacagtaccaaaagctgccgccaagccgatgtgttggcatttgtccacagcttattgacaagcttgaacaagtatttggaaaagaaaatataaaaacattgaaaaaaatcaaggaaaagctctaa

SEQ ID NO: 2489 - DNA, 2661 bp, unclassified Clostridiales
atggaaatcaacagggcgaaactgtcgccgatgatgcagaagtactttgagacaaaggatcagtatcctggctgtattttattttacagactgggtgatttttatgaaatgttttttgatgatgcgattactgcgtcaaaggcactggagattacgttaacaggaaaagaatgcggactagaggaacgggcacctatgtgcggagttccttttcatgcagccgacaattacatagatcgtttggtaaaaaaaggctatcgtgtcgctattgcagagcagatggaagatccgaagcttgcaaagggtcttgtaaagcgtgaggttatccgtgtggtgacaccaggaacaatttgtgataataaggcacttgatgaaacaaagaacaattacattatgtcaattgcctatgtgggtggcatttacggagtgagtacgtgtgatgtatcaacaggtgaattttatctgacagaattaaagacaaaagaacagttagaggatgagctgtttaagtttacaccggcagaggtaatatgcaatgatttgtttgaattaagtggagaaaatctggatgaattaaaagacaggctgcattttactgtatcaacaccagattcctggtattataaggaagacaatgcaaaaaagattttaatggagcattttcatacaacttcgcttcttggaattggtctggaggattatgattcaggaatgatatcggcaggtgctttgatgcagtatttgtatgatactcagaaaagtacaatgccacatattacaaatattcagccatatacgacaggctgttatatgattgtggatacatcgacacgccgtaatttggaactgacagagacacttagagaaaaagaaaaacgcggaagtttgctttgggtgcttgataagacaaagacagcgatgggagcaaggcttcttcgaagctttattgagcagccacttattgatcgtgcgagaattttaaaaagacaggaagcgattgaagaactgctaaacgaatatgtgacaagagaagaaattcgagagtatttgcagccagtttatgatctggagcgtttggcaggtcgtatcagttataagacagcaaatccaagagatcttttggcatttgcggcatcacttcgcatgctgccgccgattaaacagcagttagctgattttaaaggatcactgctgaaagaattgtatgatgaactagatacgctggacgatttggaagcattaatcagcagtgccattatagaggatccgccgcttgttatcagagagggaggaatcattaaggatggctataatgaggatgtagataagcttcgccgctcaaagacagagggaaagaactggctggcagagctagaggcaaaggagcgtgaacgcacaggaattaagacattgcgagtgcgttacaataaggtgtttggttattatattgaagtaaccaattcctttaaggacatggttcctgatgattatacaagaaagcagacacttacaaatgcagaacgctttatcacgcaggagttaaaagagcttgaggatttaattcttggtgctgaggataagctggcagcgcttgagtatgaattgttctgtgatgtgcgagatcgtgtggcatcgcaggtagaacgtattcagaaaacagcgcgtgcagttgcgcttcttgacgttatcgcatctctttcttttgttgcggaacgtcagaattatgttaaaccacagatcaatgaaagaggaattcttgatattaaaaatggccgtcatcctgttgttgagcagatgattccaaatgatatgtttgtagcaaatgatgtgctgcttgacaatggaaagaaccgcatttcgattattacaggtccgaatatggctggaaagtcgacttatatgcgtcaggtcgcattgattgcgcttatggcacagattggaagctttgttcctgcaaaatcggctaatatctgtataagtgatcgcatttttacaagagtaggtgcttctgatgatttggcatctggtcagagtacctttatggtagagatgaatgaggtggcgaacattcttcgtcatgcgacaaaaaagagtctgattattcttgatgaaatcggacgcggaactagtacatatgatggtatgagtattgcgtgggccgttgttgaatatattgcggatgccagacagcttggtgcaaaaacgctctttgcaacgcattaccacgagctgacagagcttgaaggcgcattaaatggtgtaaataattattgcattgccgtgaaggagcagggtgacgatattgtctttttgcgaaaaatagtcaagggtggtgcagatagaagctatggaatccaggttgcaaaactggcaggtgttccagaccgtgttataaaccgtgcaaaggaactggttgaggaactgactgatgctgacattgcagctcgtgcaagagagattgcccagatgcagtcaacaccatctaaaaagcgcgtatcacgcccagatgaagtagatgcaaatcagctgacactttttgatacagtaaaagatgattctataatagaagaaatcaaaaaactagaaattgcaaatatgacgccgcttgatgcacttaatacgctgtatcgtatgcaggcaacactaaaaaatcgcatttga

SEQ ID NO: 2490 - DNA, 2196 bp, unclassified Clostridiales
atggcaattcaaattagcccaaatggtcgactgatgaccattcagacaaatgattccagttatcagatgcttgctgataaaaatggagtgcttcttcatttatattatggaagcagtattggtgcagaggacttatctgatcttattgttagaagtgatgttggtttttctggaaatccagaggaagcaggactggaccgcacatattcacttgatacactgccgcaggaggttgcttctagtggtgtaggtgattttagggatgattctgttcgtctgacacatccagatggtagctgtgcagccgattttcgttttgagagctgtgaggtcgtatccggtgcatattcgattccgggtatgccagcactgtatgacacagataaaaagaacagtgaaacgctgatcattaagatgaaggaaaaggcgtcaggagcaattcttcatttatattatggtgtttgggaagaggaaaatgtaattacaagaacggcaagtttgactaatgcagggaaggagccgatctatgttgagaagtttttgtcatgcagtatggatatgatggatcgcgatttggaccttatcagcttcacaggccgtcatgcgatggagcgcacaatggagcgcacaccagttacgcatattaagacagaatttggaagtattagaggaacatccagtcatcactataatccggcaatgattctttgtgaccgtcatgcaacagaggatgcaggagactgcttcggtttatgtcttgcttacagcggaagttttactgcaatggcacagaaggatcaaagagatcagattcgtgttcagatgggtattaatccgtaccagtttcgttggtgcttaacagggggagagacattctttgcaccgcaggtgattctttcattctctaatcagggatttagcaaattgtcacaccagtatcatgatatattacatgagcatatgtgcagaggtcgttataagcatgagcgccgtccagttttgattaataactgggaggcaacatattttgatttcaatgaagagaagattgaaaagattgcggcgcaggcaggagagcttggcattgagatgatggtgcttgatgatggttggtttggcaagcgtgatgatgacaacagtggccttggtgactggtttgtcaatgaaaaaaagattcgcggaggtctgccaaagctttcagagaagatccatgaaaagggtatgaaatttggtctttggtttgagccagagatgatctcagaggacagtgatctttaccgtgctcatccagactgggcaatcacaattccaggacgtgtgccaaatcatgcccgcaatcagcttgtgcttgatatgacaagaagtgatgtgcgcgactatctgatggctcgttttgaagaaattcttggaaacactaagatcgagtatgtaaagtgggatatgaaccgcagtatctgcgatatgtacagccatatttacaaaggtgagcagtcaggcgaatgctatcaccgctatatacttggagtttatgatttgctggagcgttttgtacagcgtttccctgagattctgcttgagggctgcagcggcggtggcggacgtttcgatgccggaatgctgtactattcgccacagatttggtgcagtgacaatacagatgctatgaaccgtcttgatatccagtatggaacatcattcttctatccgatcagttcagttggtgcacatgtatctgcatgcccaaatcaccagacaggacgaagcgtaccgctttctacaagagctgatgtggcacttgccggaagttttggttatgagcttgatcttcgtcttctttcagatgaggaaaaggcacaagtaaaagagcagatcaaagagttccacgactattatgacttgacgcacgagggagattattaccgtcttacagagcgtgataatacaagctttacagcatgggaatttgtcgcaaagaataaagaacgcgcacttgtagaggtagtaaaaaaggatgcatggggcaatccgcttcctgttcatgttgcaatcaagggactcgaagacaattcaatgtatgtttgcagtttaaatggaataaagcgcagcggaaagacctggaatcatgcaggcataacacttccgaagtttttgagtgcaggcgagagtatgaaattcacattcatgaaggtggagtaa

SEQ ID NO: 2491 - DNA, 2031 bp, unclassified Clostridiales
atggacagcaccaaattcagtaaaccaatcagtctaaagcgtattcagcttgatggtggattttggaagccagagatggagttggtaagaaaggaagtaattccttatcagtgggaaacgttaaacgacagagtaccagaggcagcaccaagctactgcatgcataattttaaagtagcaggacggatgaataaagaaaagagagagcttggaagcaggtatcaggaaccaacatatacatttcgtggttttgaggcacttccagatgatccaagacatcctgatgatgataagttttatggatgtgtcttccaggacagcgatttttccaagtggattgaggcagtggcatattcattgacacagcatccagatccagagcttgaaaagattgcagacggcgcaattgatattgtgtgtgcagcacagcttgaaaatggatatcttgatacctactatattattaatggtatggataagatgttcacaaacttaaaggatcatcatgagctgtactgctttggccatttaacagaaggtgctgtcgcttactatcaggcaactggcaaggataagctgttaaaggcagcaatgcgtttcgctgatttcattgcatcatattttggaacagaagaaggcaaatgtaagggttatcctggtcatgagattgcagagatggcacttgtccgtctgtatgaggttacgggtgatgaaaaatataaaaagctagctgaatattttgtcaaccagagaggcacgcagccgtattactttgatagtgagggcaaggttacagaaaaggaaaagaagacaaagatccgctatcagtattatcaggcacatttgccagtgagagagcagaaaacagcgatgggtcatgctgttcgcgccgtttatctctactctggtatggcagatgtggcaagactgacaggagatgattccttgtatcagacatgcgagacgctttggaataacatcactacaaaacagatgtatgtgacaggaggaatcggacagacgcatcatggtgaggcatttacatttgattatgatatgccaaatgatactatttatgctgagacgtgtgcatctatcggtcttgttttctttgcccgccgtatgcttgagatgaatccagattcaaaatacgcagatgttatggagctggcgcttcacaatggcgttttaagcggtatggcacttgacggaaagagctttttctatgtcaatccgttatctgtcaatccaagaagctgtcatgatgatccaggcaagcagcatgtaaagcctgttcgtcaaaagtggtttggctgtgcctgctgtccgccaaacttagcaagattgatcagttctattggttcctatgcatacacagaaaatgaagataccttgtgggtacatttgtatgcaggcggtactgttgaaaaagaggtaaacggacagaaggcgcaggttgttattacttctggcctcccgtgggacggagatgtgacactcaaggtagagagtgaacagccagttacaatgacagtagcacttcgcattccaggctggtgcggtgaagatttcgagctggaaggtgctgttggcaaggagtgccgtatggaaaacggctatctgtatgtcagcggtgagtggaaagaaggggatttgttaaagcttcgctttgcaatgaaggtaaaggtaatgcaggcagacagcagagttcgtcaggatgagggcaaggttgccattatgagaggaccggttgtttactgcttagaggaagctgacaatggacagggattgccgcttgtgcgagtaaagccagatgccgtctttactgaggaaaagactgatgagcttggctttacgatgattatgctgcgtgtagacgcaaaaacaaagaagccggtaacagtagaaaatggcttatatcaaacatggcaaaagccagtatatgaaggaaaggaacttcgtttcatcccttactatgcatgggcaaaccgtggtgaaggcgaaatggaagtttgggtaaatcagctatga

SEQ ID NO: 2492 - DNA, 2658 bp, unclassified Clostridiales
ttggaggaaacgattgtggaaaagtatggagtaaatgaattacgccggatgttccttgattttatggagagcaaaggacatctgaagatgaagagtttttcactggtgccgcacaacgacaacagccttttaattattaactccggtatggcaccgttaaagccatattttaccggacaggaaatcccaccgagacgcagagtgacaacctgtcagaagtgtatcagaacaggtgatatcgaaaacattggaaagactgcacgtcacggtactttctttgagatgcttggaaacttctcttttggcgattacttcaagaaggaagctattgcatggagctgggagtttttaactcaggttgttggtcttgatccagaccgtctgtatccgtccgtatatgaggatgatgatgaggcatttgagctctggaataagcagcagggcattccggctgagagaatcttccgttttggaaaggaagacaacttctgggagcacggttcaggtccttgcggtccatgttctgagatctactacgacagaggcgagaagtatggctgcggtaagccgggctgtactgtaggctgtgactgtgaccgttacatggaagtatggaacaacgtattctcacagtttaataacgatggacatggtcattacacagatctgattcagaaaaacattgatacaggtatgggtcttgagagactggcagttgctgttcaggacgtagattctatttttgatgtagatacacttcgcgcactgaccgaccatgttggtgaggttgcacatgctgtttatcatgaggatgaaaagaaggatgtttccattcgtatcatcaccgatcacatccgttccgtaacatttatgatctccgatggtatcatgccgtctaacgagggcagaggctacgttcttcgccgtctgcttcgtcgtgctgcacgtcatggaagaatccttggaattgatggtctgttcttaagcgagttagctaaggtcgtaatcgcaacatctaaggatggttatccggagttagaagaaaagaaagagatgatcttaaaggtaatctctgaggaagaaaataaattcaacaggacaattgatcagggtctgacaatcttagaggatcttgaggcagcaatgaaggaagaaggaaagactacacttgacggtgctgatgcattcaagctgtatgatacctatggcttcccgcttgatcttacaaaggagatccttgaggagaagggctttgatgtagatgaagaaggcttcaaggagaacatggaagcacagagacaggctgcaagaaaggctcgtaagacaacaaactacatgggagcagatgtaactgtataccagtccatcgatccgtctgttacaagtaagttcgttggatatgacaagcttgtaagcgactcaaagatccttgttttaacaacagaggatgagatcgtagaggcacttacagatggtcagaacggaacaatcattaccgaggagacaccattctatggcaccatgggtggtcagcagggtgatatcggtgttatcgagacagagagcggaagcttcactgtaaaggatacaattcatcttcagggcggcaagatcggccatgtaggaaccatgacaaagggtatgcttacacagggcgagactgttacattaaaggtagatgagaagaaccgtcagctgacaagcaagaaccacagcgcaacacatgttcttcagaaggcactgcgtatggtacttggaagccatgttgagcaggctggttcctatgtatcaaaggatcgtctgcgttttgacttcactcatttccaggcaatgacaaaggaagagcttgcaaaggtagaggagatcgtaaatgatcagatcgcagcagcacttccagttgttacaaaggaaacaacaatcgatgaggcaaagaagatgggcgcaatggcactgtttggtgagaagtatggttctacagtacgtgtcgtttgcatgggagacttctcattagagctttgcggtggtacacatgtatcaaataccgcagcaataaattgcttcaagatcatttctgagtctggtattgcagcaggtgttcgccgtatcgaggcacttacatctgagggtcttattcactactacgagaagctttcagctgatcttgcagaggcaagcgcagcagcaaagactactccggacaagctgacagagcgtatcgagactatgcagggcgagatcaaggcacttcagtctgagaatgagaaattaaagaaccagatggcaaaggatgctgtcggcaacgtaatggatcaggtagtagagattaatggtgttaagcttctggctgtagcacttaaggatactggaatgaatgagcttcgcaacttaggcgatcagttcaaggagaagcttggaaacggtgtcgtagtaatcgcatctgcagcagacggcaaggtaaaccttatggcaactgcaacagacgaggctataaaggccggcgcacatgcaggaaatcttatcaagggaattgctgcacttgtaggcggtggcggcggtggccgtccaaatatggctcaggccggcggaaagaatccagacggaatccaggctgcacttaaaaaagcagcagaggttcttaaggatcagttaaacaaataa

SEQ ID NO: 2493 - DNA, 2805 bp, unclassified Clostridiales
atgagtaaatttacacttgactggaagcaatatgctgcacttgcaagacaggctgctgctgagggctgcgtgcttcttgaaaacaaaaacaatacacttcctcttgccgatggcgagacatgtgctgtatttggccgtactcaatttgagtattataaaagcggaaccggatctggcggtcttgttaatacaagctatgtacatgatcttgactatgcccttacagaatcttctcttataattgacgaggaagtaaaaacagcttacaaaaactggttaaaagatcatccttttgatttgggaaatggctgggcacaggagccttggtgtcaggtcgaaatgccgcttagcgatgaacttgtatctggcgctgcttcccgctgccagactgcacttatcgtaatcggccgcactgctggtgaggaccgtgacaatgctgctgagaaaggaagctggtatctgacagacggtgaagaggcaatgcttgaaatcgtatgccgccatttttcacgtacagttgttatcttaaatgttggaaatatcattgatatgagctttgttgaccgctatgagccatcatctgttctttatatatggcagggcggcatggaaggcggttctggtgctgtcgatgtcatcaccggaaaggttcctgccagcggacgcctcagtgatacgattgcttatcatattgatgattatccatctatccggaattttggctgtgaggataccattcgctatgaagaagatatctatgtaggctaccgctattttgaaacatttgcgaaggaaaaggttcgctatccatttggctatggtctgtcttatactacctttgatgtacaggctgcacttgacatgtgttctctgccagccggacttgcaaagggcgaagtttccaaaaccgataccttaaatgttacttacgatattacaaacacaggcgatgcggcaggtaaggaaacaatacagttttatgtacaaaagccacaaggttttcttggaaagccgtctcgcgagctgattcgttttgcaaagactgaacttcttgaacctggggaaggtgaaagcggtattcttgcaattgacttttatgcactttcctcctacgatgacagcggcattacaggacatgcgttttgctacgtgcttgaggaaggcacctatacaattttagctggtaccaatgtgcgaaatgcaaaggaaatcggaagcttcgcgcttacagaaacagttgttttagaagaactctcccagcagcttgctcctcgccgccatcttgagcgcatgactcctaagacaaatgaggatggtacacttgtacctattattcaggctgctcctgtttacttacagcattacagtgaggatacatgtccgcaatgtgctgactatactggtgataagggctataagcttgatgacgtaaaacgcggcattgtttctatggacgaatttcttgcacagctgtctgatctcgatttgtgccatatagtaaagggcgaaggcatgtcaagtccaaaagtaacacctggaactgctgctgctttcggtggtctgacaccaactcttacatactttggcatcccggctggctgctgcacagatggtccgtccggccttcgcatggactgcggtactaacgcatttagtcttcctggcggaaccttgcttgcctgcacgttcaacacaagcctgaacgctgatctttttgaaatggaaggaatcgagatgagaaataaccatatcgaaagccttcttggacctggcatgaatattcaccgctgtccgctaaacggccgtaacttcgaatatttctctgaggatccacttttaagtggtgtgatcgccgcctctcagttagagggaatgggacgcgctggtgtaacaggaacaatcaagcatttctgcggaaataatcaggagtatcaccgtcgttttgtggacagtgtcatttctgagcgcgcagttcgtgaaatctacttaaagggctttgagattgctgtaaaaagcggctatgcaagctctattatgactacctacggaagcgtaaatggtctttggactgctggaaaccatcagcttaacacagatattttgcgtagtgagtgggactttgacggcatcgttatgacagactggtgggctgagatcaacaatgcaccaaaggacaagccatctcaggaaaaatttgctgctatggttctcgcgcagaatgatctctacatggtaacatccgatacaacgcaggtaatgggtgatcttgaagctgcacttgcaagcggtcgtttagagcgccgtcatctgactcgctgtgctgaaaatatctgccgctttttgatgaactcccctgctcttcttcgtcttactggcaaagaagcagatattgagcttgtaaatgtaccggaaaatgcacagcttacttctgattttgatatcgtatatcatgatatcaagggagttaccacacttcctcttactggaatttccagcgaaaaaggcgacagccatatgtttggaatcaccaccgagggctttggtacttttcgtatcagcatcacagcttcctcagagtccacaccactcgctcagatgccggtatctgtctttgtagacaatcagctgtttggcacctacagtttcaacggaagtgaaggaaaggaagtgacactctccagagagggcggtgtatttggcttccaccactatgtacgcctttactttggtcagggcggtcttactccaatttccataacatttgagccaattgatattgtcactagctttagcgataaagattga

SEQ ID NO: 2494 - DNA, 2607 bp, unclassified Clostridiales
atgaatattaataaatttacacaaaaatcaatgcaggcagttcaggattgtgaaaagcttgcgtatcaatatggaaatcaggaaattgatcaggagcatctgatcgttgcactgttacatcaggaggatagtttgtttgcaaaactgatcaccaagatggatattcagcttgaatattttgaaaacagagcagttcagacacttgagaaaaaggtgaaggtgtctggtggaaacggacagctttatgtcagcaatgcactgaataaggtacttgtcagcgcagaggatgaagcaaaggcaatgggagacgaatatgtttccgttgagcaccttgtcctgtcacttattcgttatccaaacaatgatgtaaaggaactgtttcgcgagtttggtattaccagagaacgttttcttcaggtattatctactattagaggaaatcagagagtgacatctgataatccagaagccacttacgatacattaaacaagtatggcagtgatcttgttgataaggcaagagatcataaacttgatccagtaatcggacgagacagcgagattagaaatgttgtacgtattctttcgcgtaaaacaaagaataaccctgttttaatcggtgagcctggtgttggtaagactgcagttgtagagggtcttgcacagcgtattgtccgcggtgatgttccagaaggtttgaaggacaaaaagatcttttcacttgatatgggtgcacttgtagctggtgcaaagtatcgtggtgaatttgaggagcgtctgaaagccgttcttgatgaagttaaaaagagtgaaggtaagattattctattcatcgatgagcttcatttgattgttggtgcaggcaaaactgatggcgcaatggatgccggcaacatgttaaagccgatgcttgcaagaggtgagcttcattgtattggtgcgacaacacttgatgagtatcgcaaatatattgaaaaggatccagcactagagcgtcgttttcagccagttttagttgatgagccaacggtagaagataccatttccatcctgagaggtctgaaggatcgttatgaggtttatcatggtgtaaagattaccgatgctgcgcttgtaacagcagcaacactctctaatcgttatatctcagatcgtttccttccagataaggcaattgatcttgtcgatgaggcatgtgcgcttgtaaagaccgagatggattccatgccggctgaaatggatgagctaagtcgtaagattatgcagcttgaaattgaggaggctgcattaaagaaggaaactgatcacttgtcacaggagcgtcttgagacactcaagcaggaactttcaagtctgcgtgaagagtttgcaggcatgaaggcacagtgggacaatgagaaaaagtcagtagatcacttaagcaagctgcgtgaggaaatagagcaagttcatcagcagattgctcaggcacagcagaagtatgatcttaacaaggcagctgagttacagtatggcaagctgccacagcttgaaaaacagctggcagcagaggaagaatctgtaaagtcaaaggatctttctcttgttcatgaggctgttacagatgatgaaatctgtaaaattatttcaaaatggacaggtattcctgttgccagacttacagagggtgagcgcgagaagacacttcatctggctgatgagcttcataagagagtcgttggtcaggatgaggctgttgagaaagtaacagaggcgattcttcgttctaaggcaggaattaaggatccttcaaagccgattggttcgttccttttccttggaccaactggtgttggtaagacagagcttgcaaaggcgcttgctcagaatctgttcgatgatgaaaacaacatggttcgtattgatatgtcggagtacatggagaagcattctgtatctcgtctgatcggagcgcctccgggatatgttggatacgatgaaggcggtcagctgacagaggcagtacgtcgtaaaccatacagtgttgttttgtttgatgaggtagaaaaggctcatcctgatgtatttaacatcttacttcaggtacttgatgatggtcgaatcactgattcccagggtcgtaccgtagactttaagaatacgattttgatcatgacatctaatattggatcctcatatttgcttgatggcattgatgagcagggcaatatcagatcagaggcagagtcagctgttatgaatgatcttcgcggtcatttccgtccagagtttttgaatcgtcttgatgagataatcctctttaagccattaacaaaggacaatattggcaatatcattcatctaatggtagcagatgtcaataatcgtcttgaagatcgtgagctgtcgatttctctgacaaaggatgcagagcagtatattgttgagcatggctatgatccagtatatggtgcaagaccgctgaagcgttacctgcagaagaatgttgagacacttgcagcaagaatcattctttctggagaagttcacgcacaggatgttattgaaattgatgtcggtgatggtggtttgaaggcagaagttgttcatacacctaagaaggcataa

SEQ ID NO: 2495 - DNA, 2544 bp, unclassified Clostridiales
atggaaaacgaagagaagggcattctggtcgagcaggttgttcaggctgaccgaatccggactcacggcaagtttcatgagcgattgtttttgctgctgcgcattatctattttttaataggaatgcttggtgtggtgcttggacttgcgcttacctatgagattgagctaaattatgtgctgcttgtggtgggaacgattgtgatcggccttcttataacagcagcctgggaactcccaatcagccgcatgattacatggccggtcttatttggcatttatctgttagcaggaattgtatttcacaacagtatttttagtggattattgggattctataacagttatgcaggatatataaatgagtattatggtacaaaagtttcacttgcagctattgagccagtttcagcagcctcttatttgattacgctgttgtttgcagcatttttaattggagcaattttatcgcttggaacgattcgttcattagatggaagggtgacagcactattatttggcgtaatctttattcttgcgcttgcagttggagagcttccggcaatgccatcatttttaatgatgctgtttgtgctgataggtatgttttctctgcagtacagccgttatcgtgagagtcttagtgtgagaacagttacagtaaagatgagcaatagcgcatttggaatgcttaggtggcagacatctgttgtaattgccgctttgttcttgctgcttcttccagtgagccgttttatgttaggacctgcatttacagatggatatgaagcacaaagccagatacgtgaagatattcgaaacggagatctgttaaagagtctggagaccttctggaagaaggtgactagaggtgagtgggattggcttcctgttgatattattcgaagcagcggcgtccacggcggtaagcttagtaatgtaaaagaggtgcgcgattataatgagacgcatttatatttagatatttcgagtgatttaaaggcaccgctttatattcgaggctacgtaggaagcaattatacgggcagcggctggcgcgagcttagtgataagcaaaacgaagagggacttgcaacgggtatggatctgataagcttaagcagtcagtattatcaggttttggaaaatctctataatagtggtgatgaatccgttgccagacgagatcttgttatttcagacgtagatgcaaacagtgccttctcgtacattccgtatggtacaagtcttgttgattttacagcgggggagccatttgatgcgtatccaaagcaggaaacagatagagagatcttttctatgtactatatgaatacgcagcgtctttcaaatattcaaaagcttgagacggcaggctcatacgaaacacaagatgcgtcttaccgcgcctttgcagattcagtctatctgtcactgccaacaaagggacttgattccttctatgaagaatattcaggaaagaaatttacatcaattgcagattgtgtgtcatttgtgcgatcaacgcttgaagcgcatgcctcttatacaaagataccaggctcaactccgcgtggaaatgattatgtagaatatttcctgtatgaaaataagcagggtgtatgtacgcattttgcatcagcagcagtacttttattcaggctttatggaatcccggcgcgctatgtagaaggatatcttgtgcgcgatttggaatcaggaaatggtgcacaggccattatggatgaggcagcgcatgcctgggctgagatttatgtaaagggtgttggctggattccaatcgaggtaacaccaggctttatagatgaggcagatttagctgattcaaacgacggacaggattctactattagttccgatcagcttgaaaatgcaacaaatccggcagaaccagagacgcaggtagaggagcctcaggcaacagtagagggaatctttgaaactacgccagagacaacagcagaaaatgagcagccatcagaaccggctaagccatcagagcaaaatcagccaacagcgccgaatcagcagcaaagtcagagcgatcctaataatcagaataatacagataattctaaggataatcattttttcaagcttctaatgcgtgtgattttgattgtgctttgctgtattttatttattgcacttatcatctttggaatgatctatcagagaaagatgcgtttaaagcgtcaggaacagcatttaaagggtgagccaaaagaagcattattatatgctctttccagaatggatgcgctgtgtgaagcagaaaaccttgagaaaatcagtacagcagctgatgcagcagcgcttcaggaatcattcccgacaataacacaggaaaaactgatgtggcttcaggatcttttgcaggaactcacctttagcaatcatgcctacggaacagagctgcgcgatgagacggcacagctgtatcgtgatatggcatcagatgcgacagctcgtcagagccgccttaaacgtatgtggtatcgctatggaagatgcttctgctaa

SEQ ID NO: 2496 - DNA, 2373 bp, unclassified Clostridiales
atgacacttaaggatcttgaaataggaaagacagcggttgtcaccgttgttggaggagaaggtgcgctgaggcagcattttcttgatatgggtgtgattcccggagtttcggtgacggtggtaaagctggcgccgatgggcgatccgatggagcttagaatccacggatatgagctgactcttcgtctggcagatgcagagaagattttaattgatgaatcttctgtgacaaagtcggatggcaaaagggaaaagaacacaaaaaatatttccaaagagaatgctgtgacagagcatcctggtcttggtgaaggcggacgtttccaccaaaaggcagatgagcatccagttcctaagggaacagtattgacatttgctcttgcaggaaatcaaaactgcggaaagacaacactttttaatcagctgactggttcaaaccagcacgttggaaattttccaggcgtgacagttgacagcaaaaatggtcagattcgaaatcatcctgatacgcttgtgacagatctgccaggcatttactcaatgtctccctacagcagtgaggagattgtgacaagagagtttattattaagcaaaagcctaccggcattataaatatcgtggatgccacaaatattgagcgaaatctgtatctgacaatgcagcttttggagcttgatgtgcctatggtgcttgcactcaatatgatggatgagatgcgcggaaatggcggatctgtacgcatcaataaattggagtctatgcttggtattccagttgtcccaatctcagcagcaaaaaatgagggtattacagagcttataaaccatgcaattcatgtggcacaatatcaggaaaagccaagccgacaggatttttgcgatgaaaacagtcataacggagcagttcatcgctgccttcatgcaatcatgcatctgatcgaagatcatgccgttagggcaggtattccggtgcgttttgcggcaagtaagcttgttgaaggcgatcagcttgttgagcaggcattaaacttagagcaaaacgagaaggaaatgattgagcatatcattgtgcagatggaagaagagcgtggacttgaccgcgcggcatccatcgcagacatacgtttttcatttattcaaaagctgtgtgatcagacagtgattaagccaggtgaaagcaaagagcatgaaagaagccggaaaatcgatgcagtattgactggacgttatacggcacttccaatgtttgctgcaatcatggcacttgtattctggctgacatttggtgtgatcggtgcaggacttcaaaatgtgatggagattggaattgactggctgacgcaaaagacagatgctgtgatgacgctatggcaggtcaatgatgtgcttcattctcttgtaattgatggtatatttaatggtgtcggaagtgtacttagctttcttcctattattgttacactgtttttattcttatcactgcttgaggatagtggttatatggcacgagttgcctttgtcatggacaagccgcttcgtaagattggcctttccggacgaagcattgtgccaatgttggttggatttggatgtacagtgcctggtgtaatggcgacaagaacactgccgtcagcgcgtgaccgtaagatgacgattatgcttacaccatttatgagctgtacggctaagcttcctatctatggattttttacatcggtattctttccaaagcaaagcggtcttatcatgattggtctttactttttaggtatagcaatgggtattttaacagctgttatttccagaaagactatgtttcatggagaagctgttccatttgtaatggagctgccaaattatcgtcttccaggagcaaaaaatgtactccagctgatgtgggataaagcaaaagatttccttcaaagagcatttactgtaatctttatggcatctcttgtaatctggttcttgcagacatttggattacatttaagcatggtagcagattcaaaagacagcattttagctgcagtggcaggtgcaatcgcaccaatctttgcaccgcttggttttggtgactggcgtatttgcacatctttaattgcaggatttatggcaaaggaaagcgttgtttctacactttcagtattgtttggaagtacaaagacattgttggaagtactctcgccgctgtcagcagcatctcttcttgtattttgtcttctgtacacaccatgtattgcagcaatctcttccattaaaagagagctgggaacaaaatgggcagtaggcattgtgctattccagtgtgctgtagcatgggtggtagcatttgtagttcatttgatcggaatggctattttagcgttataa

SEQ ID NO: 2497 - DNA, 2013 bp, unclassified Clostridiales
atggatcatttattatatggatgtgcatattatgatgagtatatgccgtatgaacggcttgacaaggatcttgctatgatgaaaaaggcaggaatcaatgtaatcaggattgcagagtcgacttggagcacagaagagccagaagacggagtgtttgatttttctcatgtcacaaaggtactagaagcttgtgaacgcgaaaaaattaatgttattatcggaacaccaacatatgcaataccagcttggatggcaaaaaagtatccggatatcatggtgacagataagagtgggcgacgtccatacggtgcgcgtcagattatggacataacacatcacgcttaccgtttctactgcgagcgtattattcgtaagctgatggaagtggtaaaggactattcctgcgttattggatttcagcttgacaatgagacaaagcattttggtacgagcagcgaaaatgtacagcaggcatttgtatcatggattaagaagcagtatcagggagatattgagaggttcaatcacgatttcggactggattactggagtaacagaattaacagctgggagcagtttccaagtgtaagaggtactataaatggaagccttggctgtgcatttgagcagtttcaaagaagtcttgtaacggaatttttgatgtggcaaagaagcattgtgcaggaatatatgcgcgaggatcagtttgttactcataattttgactttgcatggaagggtcattcttacggtgttcaaccagatgttgaccatccggctgcatcaaaggcacttacaatagcaggctgtgatatttatcatccatcacaggatgatctgacaggaaaggaaatttccttctgtggtgatatgacacgttcacttaaaaaggataattatcttgtaattgagacagaagcacaaggttttccagagtggacaccatatccaggtcagcttaaattacaggcattttctcatcttgcaagcggagctgacagtgtgatgtactggcattggcattcaattcacaatgcatgtgaaacatactggaaaggtattttaagtcatgatctgcaggaaaatgcaatttatcgtgaggttagccagataggaaaatcatttgaggccttaagcgacgaattgattcacttaaagaaaacgaatcaggttgctattatggtcagcaatgaagcattaactgcgcttaactggttccaaattcctggcggaaaaacttcctataatgatgttgtgcgctggatttatgatgcgctttatgagcagaatatagagtgtgatattatctggacagatgaaactaatctcgatgcatataaagtgatttttgtccctgcattatatagtgcgccaaaggaagtatttgagcgtttatcagcatttgcagcaaatggaggtacacttgttgctacctttaagacaggctttactgatgagcatgtcaaggtgaattgtgacagacagccggcaggtctttctgagtgcatgggtgcctggtatgatcgttttactgcaccaaaaaatgttggtctgtctggtgaaacatttggcgtgtcaaaggatgaattgcaggtacaagactttatggagttagttgagccaactggggcaaaggtacttgccttttatgatcattatatgtggaaagagtatgccgcggtaactaaaaacagctgggacaaaggtacttgctattatatcgcctgtaagacaagtagtgcatacataaagaaattgactgccagcattgtaaaagaggcaggactttggggctggaagcaggaaattgcatttccagttatcataaaagagggtgtaaatcaggaggggaaaaagattcgctatctgtttaattattcaggaaaggaacagagcgtgaagctgccaaaagaggcgtcaaaggtatcaagagtgctcaaagaggagggcgcagttttgaaaaaagatcgtttgacgcttgcaccatggggctttgtagtagaggagatttaa

SEQ ID NO: 2498 - DNA, 2124 bp, unclassified Clostridiales
gtgtatagtgatttccgattgaaaaaatgtacgcatggtacattgctggaggaaagcatggcgaagtatcttgttatcgtagagtcacctgcgaaggttaacactataaaaaaattcttaggagctaactatcaggttatggcttctaatgggcatgtaagggatctgcccaagagtcagttagggttcgatgttgaaaatgattacgaaccaaagtatattacaatccgcggaaaaggggatattttggcgaagcttcgtaaggaagcaaaaaaggctgaaaagatttatctggcaacggaccctgaccgcgagggagaggcaatctcatggcatctgtcgaaggcactgaagctggaagatgaccagattaaaagaatcacttttaatgagattacaaaaaatgcagtaaaggcatccttaaaggagccgcgcgcaattaatatgaatctggttgatgcacagcagacaagacgtatcttagaccgtatggttggatatgagatcagtccggtactttgggcaaaggtaaaaagaggtcttagtgcaggaagagtccagtctgttgcacttagacttatctgtgacagagaggcagcaatcgaggcatttattccaaaggaatattggagtttagatgttttgcttgacgtgccaggttctaaaaagccattaaaggcacaattttacggaaaagactccaaaaagcttacgattgaaaatgaaactcagctaaatgaaattgtaaaggcagtggagagcgacaaatttgttgtaaaggaattggcgcataaagaaagaaaaaagaaggcaccaatgccatttactacaagtacgctgcagcaggaagctgcaaatcagctgaatttttcaacacaaaaaacgatgcgtatcgcacagcagctgtacgagggtgtttcaattgagggtgaaggtacgataggtttgattacgtatctgagaactgattccacacgtatcgcagcagaggctgatacagcagcaagagcatatattgaaaaaacgtatggcgaaaaatatctgacacaggcaaaaaaagaagaggctgccaaaggccatattcaggatgcgcatgaaggtattcgtcctacagatatcacaagggagccagtccgcgtaaaggaatctctttcacgcgatcagttccgtttgtaccagctgatttggagacgctttactgcaagccgcatggcagatgccgtttatatgatgaatcatgtacagcttgaatcaggcggatatgagttttcagcagtcagctcaaagctttcatttgacggctttatgagtatttataatgacggtgaagaaaaagcggcaagcgcacctgctgttgatcatcttagtgagggcatggagctttccgtgagtgaaaaagagacgcagcagcattttacacagcctccggctcactttacagaggcaacacttgttcgtatgcttgaggaaaagggaataggacgtccttctacttatgcaccgacaattactactattcttgcacgtcactacattacaaaggaaaagaaaaatctgtatgtgacggagcttggtcaggtcgtaaacaacattatgatgaaatccttcccaatcattgtagatgctgagtttacagccaatatggagtctttgcttgatatggttggcgagggcatggttgagtggaagagcattgttagaaacttctatccagatcttcatgaggcagtagaagctgcaaacagagagcttgagagcgtcaagatcgaggatcagctgtcagatgaattttgtgagctgtgcggaagacagatggttattaagtatggtcctcatggaaagtttttagcgtgtccgggatttcctgactgtcgaaatacaaagccatatcttgaaaagattggcgtagcctgcccgaaatgcggcaaagatcttgtcatccgaaagacgaaaaagggtcgtgtgtactatggctgtgagggtgcaccagattgcgattttatgtcatggaatcgtccgactggacataactgcccgaaatgtggctcttatatgatcaaaaagggaaacagagagtgttgttctgacgctgcgtgcggctatattgcaaagtcggatgaataa

SEQ ID NO: 2499 - DNA, 2475 bp, unclassified Clostridiales
aaaatcaagatccaacggatgatgaaatccgcgcatttcttgccggaaatctttgccgctgttctggctacgaaggccagcttcgcggaatccgtaactttcttgacagccgcaaagcttgtgcagacgagaaaaatagcaactgacaaagtagagctaaaagctcatatcatagaaaaggactattttatgcagaaagaatataaatcaataaataaatctgtccggaaaaaggatgcgatgcagctgcttaccggaaagcctgtttatacagatgatgtaacaccaagcgatgcacttgtggttaagattcttcgctctcctcatgcaaatgccattgtgcaggagattaatacaaaggcagcaaagttagttccgggcgttgtcgatatctatacttgggaagatgtgccgaagaatcgttttgcaattgcaggtcagacctttcctgagccatcgccatatgaccgtttaattctggatcgtcatgtgcgcttttcaggagatgcggtggcgcttatcgcagctgaaaatgagaaggcagccattaaggcaatgaagttaatcaaggtaaaatatgaggtgcttgaacctgttcttgatttccatacagcaaaggacaattctgtgcttgttcacccagaagaggactggtttccgccgtgtcctgtcggaggtgataacaagagaaatcttgtcgcaagcggatgtgactttgatggtgatgtagaaggcattatggcagactgtgatatcaccattgatcatacttatcatatgaaggcatataatcaggcaatgatggagccatttatctgctatacaagtcttgaccgttatggcagacttcacgttgtatcctcaacacagatagtattccatacacgacgtattctttccaatgcgctcggcattccaaagagtcgtattcgcgtggagaagcctcgtattggcggaggttttggtgcaaagcagacagcagtttgtgatgtatatccagcttttgtcactatgaagacaggccgtccggcaaagatcaattatacaagaacagaagcacagatcgctggttctccgcgccatgagatggaagtgcgcgtgcgtcttggtgcaaacaaggatggaaagattcgtgtgttagatctttacaccttatcaaactcaggagcctatggtgagcatggtccgacaacagttggtctgtccggccacaaatcaattccgctttatacaggatcacttgaagcatttcgtttttcgtatgatgttgtgtacacaaatcatcaggcagcaggtgcatatcgtggttatggagcaacgcagggaatctttgcgctggaatctgctgttaatgagttagctgataagcttggcatggatccaactgttcttcgtgatagaaatatggtaagagaaggcatggttatgccggcttactacggagagacagcaaatgcatgtgcgcttgaccgctgtatggagcactgcaagaagatgtttaactgggatgaaaagtatcctgttcgcgacatgggcaatggcaaagtgcgtgcagcaggtgttggtatggcaatgcagggaagctgtatttcaaacttagacgttggctctgcaacattaaagttgaatgaagacggcggctacaatttgcttataggtgctgctgatatgggtactggatgtgatactattcttgcacagatggcagcagaatgcatggactgcagcgtagatgatattgcagtatttggagcagatacagatgcttcaccgtatgattctggatcatatgcatcatcaactacttatatcaccggaaaggcagtagaaaaggcatgtgctgacttaaagaaaaagatctgcgagattgcagcacagatgatgaactgcgagaaggaagatgttgcatttgagagcagccgtgtgcgctgtatttcaactggacagacagtgtcattgtcagagattgcctataagacacagctggcaagcaacagcaatgcagaggcaacagcgtctcatttttcacctgtatcaccgccgccgtatatggttggaatggcagagatagaactcgataagctgacaggtgagggtaaggtgcttgactttatggctgttgtggactgtggtattccgatcaatccggcactggcaagaatccaggcagagggcggaattgtgcagggtatcggtcatactttgatggagaatgtcacctacgacaagtctggccgtccaattgagtctacctttatgcagtacaagattccgacacgtcttgatatgggcaagctgaaggtagaatttgaacacagctatgaaccaacgggaccgtttggtgcgaagtcaataggcgagattgtaatcaatacgccggcaccggccattgctcatgcgatttaccgcgcaacaggagtatggcacagagaattgcctatcacaccagaacaaattgctatgtcgattaaataa

SEQ ID NO: 2500 - DNA, 1842 bp, unclassified Clostridiales
atggaaaataaagaatatacccctggacagaaccgcccgggcagaagaggcggtatgcgtggacctggcatgggaagaggtcctgctgagaaggcatctgattttaaaggaacatggtcaaatctgatttcgtattgcaaaagctatcttccggttgtgatcattgcacttatctgcgcggcaggaggcacggttttgacgcttcttggaccagataagctgtcagagatgacaaaggaaattggaaaaggtcttgtaacaggcgttgatatggacgctgtttctaagattggatttacattaattgcattttatgtgtgcggtgctttgctgtcatttggtcagcagtggattatggcaacagtgacacaaaatatttcaaaaaagcttagaggtgatatttcaggaaaaattaaccgtctgccgatgagctattacagccgctctacgacaggtgatatcctctcacgtgtcacaaatgatgttgatacgatatcacagtctatgaatcaaagcatcggaaatcttgtctccgcagttacgctttttgtcggttcactttttatgatgtttaaaacagatgtgattatgacgatcactgcaattgtggcgacattgattggctttgtacttatgacagttattgcaaagcgctccagcagatatttcgtgcgccagcagcgctgccttggtgagatcaacggtcacattgaggaaatttacacaggtcatacagttgtaaaggcatataatggagaagcgcaggcaacagcagaatttgagcgcatgaataataatttaagagaaagtgcatttcgtgcacagtgccttgccggactcatgccgcctattatgacatttatcggaaacttaggctatgtggcagtctgtgtggcaggtgcagtgctgactatgaagggaactattggctttgaagtaatcgttgcatttatgatgtatgtgcgttattttacacagccgttatctcagatcgcacaggcggcacagtctttacagtcagcggcagcagcaggtgagcgtgtctttgagtttcttgaggcaaaggagatggatgacgagagcaataagacaaagacgcttgacaatgtaaagggtgatgtatcatttgaacatgtaaagtttggctatgatgaagatcgcgtgattatccatgatttttctgcacaggcaaaggctggacaaaaaattgccattgtcggtccaacgggagcaggaaagacaacacttgtcaatctgcttatgcgtttttatgagattcagggcggaaaaatctgcattgatggcattccgactaatcaggtaaaacgtgaaatggttcattctcagttttgtatggttcttcaggacacatggctgtttgagggtactgttagagaaaatcttgtatattgtacgccaaatgtctctgatgagcgcatgaaggaggcatgccgcgctgttggtcttgaccattttgtgagaacactgcagaatggctatgatacagtgcttaatgatcaggttaatctgtcacaaggtcagaagcagcagttaacaattgcccgtgcaatgatcgctgacaagcctatgttgattctcgatgaggcaacaagctctgtcgatacaagaacagagcttcaaatccaaaatgcaatggacgagctgatgaagaatcgtacttcttttgttattgcacatcgtctttccacaatcaaaaatgccgatcttatccttgtgttaaaggatggagatgtaattgaaagcggaacgcacgaagaacttttggcaaagaagggcttttacgctgatctgtacaacagccagtttgaccaggcatcgtaa

SEQ ID NO: 2501 - DNA, 291 bp, Clostridium sp. CAG:524
atggaaaagatagaattcaaaactgtagaggaactatataaaagagtatcacctgctttatattcaaaacttaaagagattaaaagaatgggttacacattagtaacagaaaaagatatatggaattatttagttgataatgattggaaaaatagaactaatttagaattatacgatttaattagtgatattatgaatgctgataattataaaataaatttatatgttacagataaactttcaagaatgaaaagtaaactagataaaacaaataatacagatatactttag

SEQ ID NO: 2502 - DNA, 531 bp, Clostridium sp. CAG:524
atgattattatgaaaaagattaaaattataggtgtttttgttataatgcctttatctattttatgtcattttttatatgaatggaatagtaattttatttttagtgtgctttgtccgattaatgaaagtatatgggagcatatgaaattaatggctactccttttctcttatatggtatttttgaatggatttattataagaaaaagaatatcaattatgataatttattaatatcactttgtatttctataatagtaggtataattgcttatttagtaccttatcttattattgataaatttattagtcataatatgatagtatctattagtttattatttttagattattgttttatggaatatttaagttttaagataattaatacaaataaaattaaatattcaaattatataggaattattttattgtttttgatatatttaatgttttattatcttacttataatccacctcatacttatttattttatgatactaaagataaaatttatggaattaaaaactga

SEQ ID NO: 2503 - DNA, 861 bp, Clostridium sp. CAG:524
atggaaaaacaagtacaagaatatataacttatttaacaccagagtatatttatataccttatgataatgaaatgttacttacattaaataaaaataaattagtttatcataatatgagtcttgggactaataatgatggaagtgaaatatttagtcctgttagtggtaaaattattggtataaaagagatggaatttaataataagaaaagtaacacacttgtaataatgaatgattacaaagataaacgtgaaaaattaaatccatcaagaaatataaataaggttaaaaaaagtgatatagtagcatctttacaaaaatataatcttaataaaaaaattaatagtaagactactcttgtagtaaattctttatataataaaaactatgatcttaaagatatggttattaattatgagtcatatgagggtatacttgaagctatagatgaatttatgtctatatttaatatgaagaattgttatatatgcattcctaaaactgatttatattctacttgtgcatatgaaaaatatattaatgcatttatgaatatatgtttagttcattctaatagtaagtttaaagatagtacttgtgtattttatagtattgaagaaatacttgctatacataaggctatacatttagattatatgtatgataacacaataataacaataaataatggtaaaagtacaatagtaaaagtaaaactatatacttcactttatgaagttttaaaagcattaagaatagcttataaaggtaaaaagatactagttaataataaagaaataaatgaaataaaagactttgttatagattctagtataagaagcgtaataataaaggattaa

SEQ ID NO: 2504 - DNA, 462 bp, Clostridium sp. CAG:524
atgaattatgaaattacatatgatactcaagttatagcacctatcgatagtgaaacatcaagagttattgaaacagaagcagaatatattgttaataacccaccattaaatatacttgaatatagttgtgaatactttggaagttcatatgaaggaagaaaagagggaactaaaaaactccttggcataacacataagtcaccaatagtagtagaagaaagtagaaaaataatctttttcccaactacatcagcagaaaatgaaaaatgtgtatggattaatttagaaaaaattgataagtactataaacttgacccaaaaagaacagcaatagtatttaagaatggcgatttaatagaattagacatatcatatggttcactcacaaatcaaattttaagagctagcagattaaaatttttactagatcaaagaatactaaaaaaagataatataatttaa

SEQ ID NO: 2505 - DNA, 519 bp, Clostridium sp. CAG:524
atgttaattatgaaaaaatcaagtgttattatatttggagtactaataatttttgctattttagttgttccaaagttaattaaaaagtttagtaatgatagtaaagttgataataccaatactactactaaaattagtaatgatagatttattgttgaaacaaaaagaatgataagaaatgttcaacatcaatatttaagtgattttggtaaatggaattattatgctttagatggatcaagggataaaaattcaaatcctgtaactactaaagaatgtacatcagctaatggtatcgatgtaacaactgatgttagcggaaatattaaacaatattgcagaatacatcatgaaaaagaaataatatttaaaagttttatagttacttttaatgctagcgatggtcaagtaaatacattatatgctaatgatggtacatacgaatatactttcaatagcaatggtggtacagttgcatttgatgctactaaagttacagctactgaaattggtaaataa

SEQ ID NO: 2506 - DNA, 696 bp, Clostridium sp. CAG:524
aagaatagtaggttaaatatgaaaaagcaggaattaaaatattataaatataaactaaaactaggaataggtaatatagttgtatcattaataatgatactacttttactattattatattttacatttgatgattattactttaattttggatataaaaaaatattaataatgataggttacttcatgctacacgaattacttcattatataggctatttaataaataaaaatgtcaataataaagacttatgtttaggaatgtgccttgaaaaaggagtaatgtattgtagatgtacaaatgaaataagtaggtcatctattatgatatcacttcttactccatttacactaataggtattatcacattaataataagttatatatttgatatgccatttctagcattcttatcagtatctaatatagcaggttcttactttgacatacttatgtttatacaaatattaaagatgccaaaagatataaaattcgcagaatatgatgaatgtgatgcatattatataataagtaataaagatttaactaacattaaaacaaaaggaatttctttagtaaagacagagaacattaataaagataaactaaaatctaaaaataataaaaagatagaaatatcaacattcagtataataatacttattatattagtagcattatcttttataatttaa

SEQ ID NO: 2507 - DNA, 519 bp, Clostridium sp. CAG:524
atggcacaagttaaaactaaaaaagaaatagtaaaaatgctactaaaaaataaagtattagaagacaaagacgaaacagaactaatggaaatgttatttgatcaagaaatagcagtagatgttgataaatatgttgaagaaaatgcaacatggaaagataggttagccgatagaataactaaaagagcaggtagttggggtttcataataggatttataatatttttattactatggatggtaataaatggagtaatactttgtgatggaaaagcttttgatgaatatccatttatattattaaacttattcttatcatgtgtagcagcgttacaagcaccaataataatgatgagtcaaaatagagccgctgaaaaagattcattacgtggtaaaaatgactataaaactgatttaaaaagtgaattaatattagaagaactacatgagcaaatgactaaaatgatatctaatcaaaataaaataattaaattattaagtgacgaagataaaaagtag

SEQ ID NO: 2508 - DNA, 642 bp, Clostridium sp. CAG:524
atggaaaaagaaaataaagaattatgtaaaaaatgtggtggattttgttgtataaaatccggatgcgattatagtgctaaagactttgatgatttaagatatgatgcattatataatatattaatggaaggtaaaacatctatagtagcttttctatcaattgaaaagaataaatttggacgtgaatatgtaacaccattcttatatttaagagctagaaatacaggtagagatgcagttgatttattaagttttaaaacaaaatgctcacttcttactgaaaatggatgcgaatatgacgcatcaaaaagaccaagtggaggattaaatttaatacctgctgaaaatggatgttatcctcttgaagatccacttgagattgtaatgacatggaagaactatcaaaaagtacttgctaaacttgttaaaagaattaccggtaaatcagtagaaaaacaacttgaatgtgacatagaaaaattatttaatgatatattaaatgagaatcttgaaaatgttacttatagagaaagacatgaaataggtcctcttgttacaaaattagcacatatgtatccgagcattttacataaatcagtaagtaaaaaacaaagtagtgaacttatcttacaaaagaaataa

SEQ ID NO: 2509 - DNA, 558 bp, Clostridium sp. CAG:524
tttatatcaaaaaatattataattataataggagaaaatatgaaaaatgtattatatgcacaacttattggtgtagtcgcaatgctcactatatctttttcagttcaatgtagaaaaaagaaacatatgatgatggttcaatctttcgctcacatgttatatgcttttcaatatgctttacttggtgctatttcagctgcatatatggatataatggcagtagtaagaaacatacttttttataaatatgataaaaatagaagacaagttccaattgttttatcaggaataataattatagtaacaggaataattggatacttaaattatacaaatcctttatcactattacctgttatagttgcaatactttatactataggagctacatttaaaaatccaagagtatataaatatgtatttggattttgtgctatagcatggttattctataatttaaaatttaaagcatatgtttgtgttataggtaacattatggaaatcacttcaacaataattgcattagttagagaaactaaaaataagaacaaaaagtaa

SEQ ID NO: 2510 - DNA, 1068 bp, Clostridium sp. CAG:524
atgaaagatagatttggtaaaattagtttatggaaatttttattttctataatgattataatatttcatgttggtaatgttcttgattataataaatttagatttaattttggatcaggaagtatagcagtagattttttctttgttgtaagtggttttttcttttgtagaaagtatataaattataagattaaaaaatcacttggagaagatagttttaactatttagtaaatagaacaagtagatttattaaatatattataattttattaattattgctattccattttctatattgtgtttaaaatttaattttacaagtgtaataaatgctttttataaattattatatataccttatcatggtaaatgtaattcagaaatttttggaataacatggtatattatggctatgattttagttgaatcaatgttatttccatttttagttaaatataaaaaagaatttgtatatattgtttctccgattattattgtcttattgggaagttatttattaattagatatggacattttgctactccttggaaaatgggaagtatactttataaaggaatattaaggggtattttcgaaataaatataggaatgtatttatatttaattagtgaaaagattagtaatattaagtttactaaattatctaaaatattacttttattgtttgaaataactggatatttaagtatttttatacttgtaaatttaaataatgctcatagaagatttgatgttttaatgttaattatattatcaatatgtatactaatatctactaataaagatatgtatttatataaattttgtaataataaattattttattacttagaaaaattaagtttacctatgtatatttatcaatggcttattattgaaatattggtatttatactaactaagtttaatattcatttatcatatttatgtttttctggtattacaattataatttctattatttttggaatgattatattaaaattaattaatttttatgatagtaaaaagaaaaaaattaaattattattcattgcaaattaa

SEQ ID NO: 2511 - DNA, 735 bp, Clostridium sp. CAG:524
atgagatatttaatgaatattacttatgatggaagtaagttttatggatatcaagttcaaaagaatgaaaagactattgaaggagaacttgaaaaaactgtttctaaaatatttaatgaaagtattaatataataggtacatcaagaacagataaaggagtacatgcgataaatcaatattgtcattttgatagtgataaaaagattaatattgatagacttaaacatagtataaatagtttaatagatgaatctatttatattaaagatataaaggtagtaagtaatgaatttcattcgagatataactgtataaagaaagaatatatatataaaataaatatgaatgaatataaccctatagagaaagattatgtatatcaatataataagaaaataccaaaagaattacttgataaatttataagtaaaatgaatggtaaacataattttaagagctttactagtgataaagataaaaagtcatatgaaagaatacttaaaatggattataagatttctaaggaaatactttacttaagatttgaatcaagtggattctttagatatatgattagaaacatagtgggattattacttgatataaataatggtaaaaagagtattaatgatatagataatatatttaaaagtgaaaatagaattagtgctggtatatgcgctagtccagtaggactttatttaaataaaatttattttgataagaggtgctag

SEQ ID NO: 2512 - DNA, 639 bp, Clostridium sp. CAG:524
atgaaaaagagaaaattagatatattatatgaagataaacatttaataatagtaaataaaaatggtaatatgccaactattaaatgtgataactataaagataatttatatagtgaagtatttgattatttacataaaaagaatcaaaaagtatttgtagttcatagacttgataaagatactagtggtatagtagtatttgcgaaaagtgaaagagtaaaagaatcactacaaaatacatgggattacacagaaagaaattatatagcagtagtacatggaataactaaagataaaggtacaataaaatcttatctaaaagaaacaaaaacactttacacttatagtactaatgataaaagtggtaaatatgctgaaacaagttatgtgagagttaaatcaaataaacaatactcattacttaaaataaatatcaaaacaggtagaaagaatcaaataagagtacatatgaaagataataatacgctaatattgggagacaaaaaatatggtaaaaaagatggttatagaaaaatgatgttacttgcgaatgagataaaatttatacatccagttactaaagaaataatccatattgatttaaaaatacctaatgaatatagcaaaattgtagaataa

SEQ ID NO: 2513 - DNA, 897 bp, Clostridium sp. CAG:524
atggtgagaaaagtgaaagtattaagtataaaagaaccatatgcaactcttatatgtaataagaaaaagtctattgagacaaggagttataagacaaattatagaggagaattatatattcatgcaagtgtatctaagattgacaaagaaactttaaataataaagaattaatggatatagttgataatgatacttttagttatggaaaaataatatgtaagtgtaaactggtagattgtgtttacatgacaagtgactatatcaaagagattgaaaaaaataaacaagaatatacttgtggatactatgaagttggtagatatagttgggtacttgaagatattgaaccattagatacaaagatagacgcagtaggtaatttaggcatatggaattattatactttagatgatacagttaacattatgaataatattgaatatggatatattgatagtgataataaaagacatactgaaatagataatttaattaatgataattatattttacaatcaccaaataaactattaaaaactaaattaggattatgttatgaccaagtagagttagagagatttttacttcaaaagaataaatggaatattgaaacatattttatgattggtaaaagtagtaaatatcatactcatacattcttaatatttgaaaaagataataaatattattggttagaaaattcatggaaaagatttaagggtattcatggatataattttaaaagtgaattaatgaatgatgttaaaaataaatttattaaatatgaattagataacattgataatatagaaatacataagtatagtaaaccaaaatacaatataacattagaacaatataataatcattgtttaaatggggaaatatatgaataa

SEQ ID NO: 2514 - DNA, 1176 bp, Clostridium sp. CAG:524
atgaaaaagaaaatgttaataatttgtttattatttataatatgtggttgtaaaaaagaagaaaaagaaactattgttgataaaataactcaaaaagacaatcttgtttttgaatatgctgataaaattaaattatatgatttagttaatacagaagaaaaattaacaagcgataataattatatagatacatataaacttggtaataatgaagtaaatattaactatttaaacagtaaaaataagaaaaagaaatacaaagttacatacgaaatagttgatactacaaaacctatcatattactttcttcatcaataacagcatataaaggtaataatgttaaccttgttaataaagcaatatgtgctgataactacgataaaaaacctaattgctatattgaaggagattacgatattaataaagttggtaaatataatttaaaatatatcgcaatagattcgaataataataaaaatgaaaaaaaatttgtattaaatgtaaaagaaaaaaagaaaagtaataataatacaagtacaagtagaaataaatatttaattaaagacttaattaaagaacataaaaatgataagacaatgattggtatagatgtttcttcatggcaaggtaacgtcgactttaaaaaggttaaagatgctggtgttgaatttgttatcattagaattggatttggtcataagaatggtgaaattgtttatgataatagatttaatgaatatttaaaaaatgccaaaacaaatggtcttaaagttggattatacttctattcttatgctaaaaacataaaagaatctaatgaacaagcaaaatggattataaaagaattaaatggtgaaacacttgatttacctatcgcatttgattgggaaatatttagtggatttaataattataatttaagtttaactgatctaaatttaattggtgaatcattcataaaagaaataaataatgcaggttatgaaggaatgctttacagtagtaaatattatttagaaaatatgtggaacttaaatgaatataaaacatggcttgctcattatatagataaaactaattataaaggtgaatactacatatggcaactttctaatacaggtaaagttgatggaataaacggagatgttgatttagacattttatatttgaaatag

SEQ ID NO: 2515 - DNA, 498 bp, Clostridium sp. CAG:524
atgaaaagtgatgtagttgatgcaattatagaaataccatatagaagtagaaataagtttgaaattaagaatggtaaaattaaattagatagagttttatatagtgctatggcatatccagctgaatatggattcattgataacactctagctggtgataaagatccattagatatattagttattggaacagaacctacatatccaggatgtattattccagcaagggtaataggggtacttaagataattgataatggatttgaagattataaaataatatcagtagtagatgtagatcctagatacgaagaaatacatgaacttaatgatctatctaagtttatattagatgaaattagaaacttttttgaaaattataaagttcttcaaaaaatagatgttaaagttgaaaaatattatcctaaaaataaagcattaaaaattatagaacaatcacgtaagaattacttgaaaagtaatggtgaagaaaaatga

SEQ ID NO: 2516 - DNA, 465 bp, Clostridium sp. CAG:524
atgaaaacgaatgtaatgagaatacttgatcaaaagaagataagatatgttattcatacttatcagaatgctgttagtggtatagaagtagcagatactttaaatgaaagttatgataaagtttttaagacattagttactgtatctaatacaaataatcattatgtttttgttgtgcctgttaataaggaattagatttaaaaaaagcagctaaagtagtaggtgaaaagagtatagatatgttaaagtcagcacttctgcttccacttacaggatatattcatggaggatgttcaccagttggaatgaaaaaacaatttaggactattgttgataaatccgcttcaaataaagatagaatatttgttagtggtggtaaaataggttatcaaattgaaatagaattaagtgaacttaaaaaagttgttgattttgaatttgaagatataactaaagataattga

SEQ ID NO: 2517 - DNA, 645 bp, Clostridium sp. CAG:524
gataaaatattatataatgtgatatacttaaatatatggagatgttatatgaaatatatattatatagaattgtaagaactcttggttatcctatatttttattattatatagaccagagtttgaaggaagaaataatattcctaaaagtggtagtgttatacttgctggaaatcatactaataatttagatgctgcgataatgcttgctggacctaaaagagtagttcatatgcttgctaaaaaagaattatttaaaagtaaaataagtaatgcattttttagaagtatgggatgtattccagttgataggaaaattcatgatgaaaatgctaaaagcgaagcaatagaagtacttaaaaataacgaagtaattggtatatttcccgaagggacagtcaatagaacaaatgatataattcttccatttaaatatggagcagtatcatttgcaaaaaagacaggtgcctatattgttccatttactataacaggtaaatataaattatttagaagaagtattaaaataacatatggaaaaccatataaagttactgatgacttagaaattgaaaataaaaaacttatgaatataattacaaaaatgcttataaaggagagaagtaatgttaaaagaaaaagataa

SEQ ID NO: 2518 - DNA, 699 bp, Clostridium sp. CAG:524
atgcttgtatatggtagaaatgtagtacgtgaaatattaaatagtaatactaaagtatataaagtatttctagataataattttcaagataatgaattattagaaaaaatagataaaaagaatctaaagaaatttcatattgataaaaataaaatagataagatgtgtggtagtagtactaatcaaggtattgcattagatatagaagaatatggatatttaaatattgatgtattagaaaatgatgataaagcaaattttattgttatgttagattctattgaagatccacataattttggagctattattagaacttgtgaatgtgctggtgttgattatataattatacctaaaaatagaagcgttagtgttaacagcactgtttataagacttctagtggtgcattaaacaatgttaaaataatagaagtagtaaatcttaataatacaataaagaaactcaaaacacttggattttgggtatatggtagtgatgctttaggaaaagactatagaagtattaagtacgattctaaaacatgtcttataattggtagtgaaggacatggtcttaaaaaaatagtaagtaattcatgtgatgagattatttctataccaatgaaaggtaaagtaaattcattaaacgcatcagtcgcatcaggaatacttatatatgaaataatgaaatataaatag

SEQ ID NO: 2519 - DNA, 1137 bp, Clostridium sp. CAG:524
atgattgattttaaagaacttatagaattatttatattaagaatattacctagtatcaagagtgaaaaagagatacctaatattaattttatatttgataataatagtatagaattatttaattatgtaatgaagcatccatttagaaagaaagatgtatggactgaagatatcacttctaaggatttagaaattactaaagaaattaataatatgaatccaaattctaatactattattattgatgatggagtatcattctttgattatctaacttctattgtaaatgaacatttaaagctatttaaggagtatgaatatactttaatgattagaagtactacaatgtcattattaactagaatatggcttagaatggatgataatgacttcaatgatgttatatcatttttaagaaaagaattagacttttataaagatagaacacttgataaatatagaacggaaacatatataagttcttatgaaggaattgattcttatgctgaatgtaatattaatgagtcatgggatgaaactactagaagtatgaattttagattagaaaatagtggtgaaagtcatactatatcaagggtactttatgatataagaagtgaaaatggaattaaagtatgttatatatatggtgttcaaaataatctatttaatataacaaataaaagaatagaaagaaaactatataaattaaataaaggtattgataatcctaaagtacatcctaatcaattatattctcttatactatttttagaaatattaaagaaagaaggaattactactattaaagtacctaagaatcaaacattaagttatggttatcataagatattaagtaataatgaaaaaacaaattttaaagcaaaatggcccgcaaaaaaagttagaaagatatatagtagtgatgatgaagacagtattaataaaagacatgaatatgagcttgataaagagtggttcaaacatattgttggtaaagaagatacaatagaaagacttaaaactgataaattatttgaactacttagaagattatgtttatatgatcctagttttgaatttgttggaataagtcctaataatgatgaaattttagtatataaattaagaaaatag

SEQ ID NO: 2520 - DNA, 687 bp, Clostridium sp. CAG:524
atgttatgtggatgtggaaaagaaagtaataagattgttatggttacagagtcaggatttgcaccctatgagtatagaagtggggatgaagtagtaggagtagatgttgacattgctcgtgaaatagcaaaagagcttaataaagaacttgttataaaagatgttgactttggttcaattattaatgaacttaattctggtaaagctgattttgcagctgctggtatgagcatagatgaagaaagaaaaaagagcgttgacttttctattgaatatgcgactagtgaacaagttgtagttgtaagaaaaggttatgataagattaaaagtatgaatgacttagaaaataagactatatctgtacaacttggtactgttgctgatacatatttaactgataaattcagtaatgttaaattatttagacaaaagaaatttttagcagctgcagaagatgttaaaactgctaaatcagattgtattgtaatggataaattaccagcaatagaacttgttaaatcaaatccagaacttgaaatattaaatgtaacattatttacagataaatatgcaatcgcagttaaaaaaggaaatactgaattattaaataaaataaatagtgttttagaaagattaatgaaagagggtaaaatagaagaatatattattaatcattcttctaattag

SEQ ID NO: 2521 - DNA, 717 bp, Clostridium sp. CAG:524
atgataaattttgtaattgtggatgacaataatatgcacaggaaaaaagtaagtagtattattatgacaattatgatgaataataaggttagttttgaaattcaagaatttggtgatttcaattctacattgttgaattattttaagaatccaaagcccaattccatttatatattagatttagaacttccaagtggtgatggtattgatattgctagaaagatcagagatgaatataatgattggactagtcctattataattttaactgctcatacatcactgtattttcaagtctataagcaaagactgcaaatattagattttattggtaaatcagataacatagaaaagaatatcaatgaaaatatagcaatatgtttaagaatgctgaatatggatagaatatataaatttacctatagacacactgactatacaatacctataaataaaatagactatattcaaagagatgacagaagaatcaaaattgtttgtaagaatgaagaatattatacaattgatacaattaattctattaaagacaattttccatcatatttcataatatcttgtaaaggaacattattaaatatgaataatgtattaaaaatagattggattaattgtaaagtttatttcaaagatggattagaagcatttgtagtatcaaaaagtcataaaaaggatatagacaattatgaaagaaattag

SEQ ID NO: 2522 - DNA, 549 bp, Clostridium sp. CAG:524
atgaaaagtataataagagaagtaaatgaaaaatcagatgatattattagagaaaataattttcttgtaattggttttcaaaaaaggttatctactagaattatgcatatttttcaaaaatataaaatagtggttaataataatattgtgtcaaaaaaactagaagaaaatttatcaaataatatgattgatattaattttgaagtgataagtaagtatagatatatgttgagaaagtatgaagaaattgtacaagaacatgtaaaaaacaaattatcaacagatgaaattaaaaagtctactattttgtttgttagcaagattaatgaaaaaaataagttaatgttaaatggtactattgctacaaattttattgaagatatgaattctataatacttgtatatgataatgcaaaattaaatgaagaagtattaaagagaataaatattgatacaaatgagattataaatgaaattaatacaaataattataattatgttattgagtcaataaatatgataattaaaaatataattagttcgctttga

SEQ ID NO: 2523 - DNA, 804 bp, Clostridium sp. CAG:524
atgaaagctgttggagtagaattcaaagataaaggcaaattatatactttttttgacaatgatttggaaataaaattaaatgataaagttattgttaatactgaaagaggattacagtttggtaaaataggtgcaatttttggagaactaaatgatggaaaagaccatgcactagtatataaaattgctacagaagaagatgaaattcaaaatcaaaaaaatgtagaagaagcagaaaaagccttaattaaagcacaagaaattgctgaaaaaacaaaactagatatgaaatttttagatgcattttttacatttgatagaaaacaattagtatttcaatttttatctgataatcgaatagattttagagaacttgctaagtcactagctggaatttacaaaacaagaattgaattaagacaagtaggagtaagagacaaagcaaaaaatatatctggaattggacaatgtggaagaaaaatttgctgttcaagttttctaaatgatttagattcagttggaattgcacaggtaaaaaatcaaaatttagcgttaaatccaagtaaaataaatggaatatgtggaagattattatgctgtcttaaatatgaagatgatttatacacagaatatagaaaaggattacctgaagtgggcgataaaaaaacatatgaagatgaagcaggaacagtaatttcagtagatattccaaatagaaaatatacattactcacagaaaaaggaaataaaattgaagtaaaggtaccattaaataatgaaagaaaattcaacaagaaaaattaa

SEQ ID NO: 2524 - DNA, 630 bp, Clostridium sp. CAG:524
atgattaaaaaatatgaaaaaatgttaaatatggatgcaactataacaaagaaattatttgatagagttaattatccatgggaagtacttccacttataaatgattatattttagaaattattcctactttaggaagtgattacattaaattaaaagataatgtttatgtacataaaactgttaaaatagaagaaggagcatatataaatggaccaactataatatgtgaaaatagtgttataagacataatgcttatattagaggctcagttataattggtaaaaattctgttataggcaattctactgaggtaaaaaattccatactttttgataaggtagagtgtccacactttaattatgttggtgattctgttttaggtgaacatgctcatttaggagctggagtaatactctcaaatgtaagaagcgataagaaagaagtaaatggtcttcgtaaatgtggttctattttaggaaataatgctgaaattggatgtaatagtgtattatgtcctggaactatagtaggtgaaaatagtagtgtttatccacttacaatggtaaaaggtgaagtagaaagtaatatgatagttaaatcaacatatgaaatagttaagaagaagtag

SEQ ID NO: 2525 - DNA, 969 bp, Clostridium sp. CAG:524
atgaaagtaggtgtacttggagcaggggcatatggacttgctcttacacatattttagtaaacaataaagttgaagtaactatgtggacacatgacgaaaatgaaagaaaaactcttgatgaaacaagaaaatcaaaaaaattaaatgattacaaaataccaaatgaaataaaattcacttgtgatttgaatgaagcagtaaatgacaaagatttaatcgttatggctattccagcatttgcttttgaagatgtaactattaaacttagcaaatatataaagaagaaacaaccagtattaattgctactaaaggtatccaacaaaatacatgtttgtttttaaatgatgtatttgctaaatatttaaagaatggtatagctgttataagtggtcctacttttgcagtggatataattaaagattcaccagtaggattcagcttagcaacaaaaaataataaaactgaaatggttgttcgaaagtgttttcaaaattcgacaactaagtttagaagaactaaagatatagtaggtatcgaaatatgtggtagtattaaaaatgttatggctattgcctctggcatgcttgaaggtatgggtgtaacagattcaacaagagcacttttcttaactgaaagtatgaatgatattaaagaattaattgatgctttaggtggcaaaaagaaatcaatattatcctttgctggatttggtgatatcttaatgacatgcactagtaagaattcaagaaattttagttttggatatttaataggtagtggagctactaatgaagaagtaaataaatatttagaaactactacagttgaaggaatgtatacattaaagtcaatacataaacttgttagacgtaagaaagtaaaaatgcctataataaacttaatacatgatattatagaaggtaaaaaagataaagaagaaatgttaaaatttttgataaataaataa

SEQ ID NO: 2526 - DNA, 1299 bp, Clostridium sp. CAG:524
atgttaatgaaaaaaatattaagtatatgttctattttaacaatttttacattttcatgtgggtttgttaaaacagatacaataataaatatagataaaaataaaaatgttagtatagaaaaaacagttttaatgactgatgaatttagtgaagatactattagtcagtttactgatgttgaaaaagttaaaagagatggattaaaagttgaagtaaaaaaagaaaatggatattcaggccttgatggtaaaaaagaatataaattagataacatttctagtgataatgttaataaaatagaaatagataaatttctaaatagtgattttgatgataaaaatcttataaaggttgaaaaaggattttttaaaaataaatatacaattgattttacttataatagagataaagtaaaagcttttgaattaatttttgctattagtaatccttatgataaagataataaaggtaatgtacttcttgagggtgctaagtatactaattgtttaagtatgattgaagaaaataagactaatgaagcaaataagaatactaaaacaaaaactaaagtaaatactaaaactaacagtaaagttaccaatgaagagttacttaattgccaaacatatgtagaagggtatgaagcttaccagaaagaaatgaaagcaaaagttgaaaaactatcaaaagaagtagaatataatttaacaataactttaccaactaaagcaatagaatcaaatgaaacagtaaagagtaatgatggtaaaaagctaacatggacatttgtaaaagaagaacctgcttcagttaattgtagttttgagatattaaatatgactaatatttacttagtgggtggtggatcactagtattagctattataattattttattaataataatgttaaataaaaagaaaaaagaaaagatagaaaatattgaaactgacaagccaatacatactgattatgatcctagtattgcatctgaaatagatgcgatgggtggatttattgatagaggtagtgaagtaccaatacctgatgttgatatggtaactaatactgttaatagtacagcaactaatactacaaatatttcaaatgaagaaattaataaacgttcttatgaatatacattaccacatgaaataccaaatgtagtaaaagaaaaagagccagaaaaagcgcctgtgtttattacatcgcagaatacaaaagaagatgaaatagttatagaagaaaagcctaaagaagtaaaaattattacaccagaaataactgatattaaatag

SEQ ID NO: 2527 - DNA, 480 bp, Clostridium sp. CAG:524
atgaataaaattgttttagttggaagattaacaaaggatcctgaacttagaagtacaactgctggattttctactgctagttttacagtagcagtaaatcgtaattttaaaaataaagacggtaattatgatgctgatttcttaccttgcgtagcatttagaaatacagcaacatttgtatcaagatattttaagaaaggtaatttaatttgtgttgaaggtagggtacaaactagaagttatgatgctcaagatggcagtaaaagatatgttactgaaatcgttgtagaaaatgctgagtttgttggtggaaaaaatgaaggttctgctcctagcgctaatacagatactacatatatggatgctccaagtgaagcacctattgatgcaatgccagagtatgatatttcaaagtcagatccatatgaaaattatgataaggatgtatcattaagtgatgatgatttaccatttctataa

SEQ ID NO: 2528 - DNA, 1254 bp, Clostridium sp. CAG:524
atggaaaatataaattataatatatatgaaattattagtagacttgttcttgaagataagggaattattgaaatatcacaagaattaaatcttgaaaaaagttttgtagtaacaatacttaagaaagcacgtaatgaatacattctttcttttgatgaaaaaaagtattatcttgtatcaaaaatagatgaactcttaaatagaaaaaagaaaagaaagatcattaataattttggtggcaaaaaagatattatttttaaattaatatgtgatggtaaaagtagtgctgaaatatgtgatatactcggaataagtatagaaggctatattaatttcttaaaatatatgtattatgagatatttctttatggtcaatataatgaaaaaatatatttatctgttataagaagtgctcttatagaaggatataaagtattaagagataatactcttgttaaaagaaaaagtggagaagttaacattattccatctattatgaggttacgcggtcttaatgaagaagtgatattaacaaatagtcctgtgtcttcattagaaactattgattgtagcgatacttttaaatttattgttatatctgatttacacgctggaagtagatttgaaaatcttgattatgtaaaaaaggtatatgatgaagcaagtaaattaggcataaaagatatatttatatcaggagattttatagaaggctgtcattgtaattatagtagatgtccttctaaatatagttcaactatctcacaagttatgcatatgttaaatgattatccatttgataatagtattacaaatcatatattacttggtaatcatgaagcatttccaattattgtagaagaatacgatatgtttatggatttaaaacgtagaaatgattttaaagtaagtggatatagaagtggatattataaaattaagagtgaatacatatcattaaaacatgaaataaatagagttattaatgaaataaatgataatgtagtattatttaattttcttggtcatagtcatcaatataaatgtaattatgatggcaaatatgttacatttagagtaccaacttgttcagacttagaaggagatacaaaagaatctattgttaataaaggttatttaatatgtgaagttcactttgatagtataggcaaagcaaataacttaagtgtaatatataaagattttgagaacgttgatacagaaattaaatttgaaagaagacttgtaaaataa

SEQ ID NO: 2529 - DNA, 447 bp, Clostridium sp. CAG:524
gtgataaatgtgagtaaaggtgaaatttataaaattgatagaaaggataataatagaaaaaatacatatcaggtaaacaagaaagatgatttagtttcatttatagtaggtatacttgtttatgctactgtacttatgatagcaaatagtctatttaaaggtattgaaatagaaaattttttctatgcaattattgctgcattaatacttagtggattaaattatacaattaaacctatcttgatatattggacgcttccacttagtgttatgacatttggaatagcatatccaatagtaaatatgattattttaaaattgtgtgatattattatgggaagttcatttaatataaatggattctttgctacttttgtaatagcaatatttataagtggacttaaaataattcttgataatataattactaagaatgtagggagataa

SEQ ID NO: 2530 - DNA, 690 bp, Clostridium sp. CAG:524
atgagaaaggttaatttaattttatttagtattttatgcttatttatttttacttttaaagtagatgcagtatgtaatgataaggcgttaaatgaatgggctacaaatgctacaattgaatatatggaggatgttgatataagagatccagaagataatcttatacatagtaaggaatacttgtatctattatttatttctacacaaaatgaaaaaggaaaaataatggtaaaagattcagaagatgaaaatgaatatgaaataaaatatgatgatgaaatattttatggatatgtagtaggctcatatctacatatgaatgaaaaaacatatacatttacattatatggggcagagaactctgcgtgtcctaatgaaaaacttagaacgatagaatataaagtacctgcatataatgtatattcaagatcaaaatattgtttagaaaatccaacagaagatatttgtaaaactaatagtaatgaaatgaaagatgtaagtgacaaagaatttattgagattattaataaaaaagaagaagaacaaaaaattgctaaaatgaacttttttgaaaaagcattatattatttaaagaaaaattggtactttatagtaatacctatagtattagtttctgctttctatgcgattagaatttatatattaaagaagaaggtggatgaagaatga

SEQ ID NO: 2531 - DNA, 750 bp, Clostridium sp. CAG:524
atgaaagtaatagttttaggaagtagtagtagtggaaactctacatttgttaatataaataatataaaattcttaattgatgcaggtcttccttttggaaaacttaaagatgcattatatgaaataggtgaaaatcctgaaaatttagactttataattgtaacacatgctcactctgatcatgtaagaagtcttcattcatttaatagagtatataataccaaagtatatatatcaatagagacatttaatgaatataataaaaaagattatataaagaattatgaattttttgatgaatttgacaatattatgggaattaaatttactaaaatacctataagtcatgataaaaaaggatttgggttcgtatttgaatatgataacaaatcattagtatacatgacagatacaggcatgatacattctagatatcatgagaaacttaaaaataaaacagtttatttacttgaaagtaatcatgatgttgaaatggaaatgaatggtaagaaatttgaatatattaaatatagaaatataggagatgaaggtcacttaagtaatgaagactgtgcaatgtatttaaatcattttataggtccagatacaaaagatataatgttagttcatataagtgaaaatgataacacatatgaaaaagcatatgaagcaaatagagaaagaatagatccaagcatccctatttatatagcatataaagataaaattagtgaagtaattgaagtatag

SEQ ID NO: 2532 - DNA, 633 bp, Clostridium sp. CAG:524
atgataaagaaaatattaaaagaaaattatatatacataataattataatacttcttattataacttttttgattgtcaaaaatactagtttatataataaggttgttaattttgattatagtgttatagagcttatgggtaatcatgttgacaaaagattaacagaagtttttagctttttaacaaattttggtgattggtacataccatctctaataatcgtgtgtattttaatatttataaaaaataaatggtactttggattacttgctggaagttatagtgtgtcaggattaacagttttagtttcaaaacttatagtaagaagaccaagacctttgaatgcattaatcgaaatacctaaaagttatagttttccaagtggccatactttaacttctatagtgttttatatgatattatggcatttagttactaagaatactaatacatttaatagaattatattttttatgtcatttacaatattagctgtattaataggtttttctagagtatatttaggtgtgcatttcttttcagatgttatgggtggacttatattagcgataccttgtacattaatgtgtataaatattattgataaaaattttgaggataaattaaaatga

SEQ ID NO: 2533 - DNA, 687 bp, Clostridium sp. CAG:524
atgatagatactgatttacaaatatatagtatatgtatttttatatcatttatattgaatataatagttatatgtttgcttaataaaaataaagacaaccttatatattatatgcttatatatgagaatattggttttatatatggaggaaaactatttacatatttaactaacttaaataaatatgacagttttgattttcttaaaataggtttttcatcattaggtagtctaataggaggcatattatttcttatattattttgtattcaatttaaaagaaatataaaagaaacattaactctatttataaagcctatacctcttatgtatgcagtaggtaaactgggatgttttttagtgggatgttgttatggaataaaatataatggaccatttagtatagtatataattatgcatctaatgatataaatggtataagattatttccagtacaattagtagagagtatagtctttatgatcatatttattttaataatgaaaaagaaagtaaatgtatataaaactatatttatatgttcactatctaaattcttacttgatgctttaagatttaaaagtaacaatatgatattaagtgtaaatcaaataggatgtcttattataatgataatttctttaattttaatatataaaagtaatgaaaagaaaaaacaaatatga

SEQ ID NO: 2534 - DNA, 639 bp, Clostridium sp. CAG:524
atgaaaataaaaatactagttatttttttcttggcattaattttgtcatttataatctataatgtaacacttaataatagaaaatcaatattgatacttggggataaccatttacttgattcaaattataaaacatatgataaatacttatatgatgactttaaaggtgatgtagttttttttaatgaactatttactgaagaagataaaacatacaaagatatcataaacgatattaaaaataataaatatgttatttctaagaataaaaatatatatttgaatcaattgatatctaatgctaatattataattttgaatgctaataatagtgaatattttaaaaaatgtaataaatctaaaagtataattaaagaatataataaaaaagtatctaatgatatagattctcttataaaaattattaataagatatcaacatctaaaataatagtgataggtaattattgtttaaatgatgaagattatagtagttattatagtaaatataattatattaatatgaataagttagtatcaaataatgaaaatatttctagttttagaacgtttaaattatcaaatgaaggcaattttacgttatataagtatgtaaaatctattaaaaatcatgaataa

SEQ ID NO: 2535 - DNA, 657 bp, Clostridium sp. CAG:524
atgaaaaagaaaatatttgtaatacttattagtatatttgtaatgattagttcagtaaatgcaacatgtgatgataatgaaagaaatagacttaaaagtttatcaaaagatataacttacgaaacttcttacagcataagtactaaaacatttacaattaaattttataatgtatttccaggattaataataggaattaatgatggtacaattaaaggtggagataataatgacagttatagtgttacaattgataatattaaagaaggtgaacatttaacagccgacatatacgatagtataggttgtaatgaaaaattaaatacattatttataacattaccatattacaataatttttatggaacacaaaaatgtgaaaaatatgttggaaagctaacacaatgtacatataagtttctatcatacgaattaacagaagatatattagacggagcaataaaatcaatagatacagaaattaaacctgttatccctgaacctgtcgtaaaaaaaacattttttgaaaaagcatatgaaacagtaaaaacatttcttactgactggggaattaacattggcttattcttattctttggaatagttacagcagtaataggagaaaaaatatatagaaagataaaacatggtatataa

SEQ ID NO: 2536 - DNA, 393 bp, Clostridium sp. CAG:524
atgtggtataatatttatgaagtgatgaaaatggaaaatatcaaagttaataatataattgaggggcaagtaatgggcgttacaaagtatggaatatttgttagtttgtgtgataattatactggaatgattcatatatctgaggtttctaataaatttgtttcaaatttagaggaaaaatttaaaattggagatgttatcaaagtaaaagtattatccataaatgaagataaattacaagttagattatctttaaaaagaattagtcgaatgaataaaatgaataaaagtattaaagaaaaaggtaatggttttcagcctttatctcaaaaaatgcctgagtggattaataaaaaaataaaagatttagaaaaaaataacaatattgcttga

SEQ ID NO: 2537 - DNA, 1143 bp, Clostridium sp. CAG:524
atgaagaagtttaaaaaatatattattctaatttgtttatttgttattgttatggtaggaatacttatattctttatatttagatacgatagaattcacttattaaataaaggtaagggcttagttaaatatgtatataatcttgataatggattatataaatataaatatggtgtacttgataataatggtaatatcattgaaactaattattttatagatggtactggtgaaatagaaaaagataaatatggtaatgtaagattatatattgaaagtaaagaatattgtatatacaaaacatatttaggaaaaataaatgtcattaaagataaatgtaatgactttaaagatttagaagtaagacttagtaaaaataatacaataatatcatttgattttaataataaagttagttcatatatgatttcaaataatgatgactttaatggtaaatggaatgatatatcaaataacaatctaatacttaaatattataataatggtaaaaaatacatatggtttcgcgataatgaaggtaatattagtaatgttattagttttgatatagaatgtttaaacacaagtaaaagtaattatgataaagatatattttattgtaatggttcaactgtatatattaattctagtgaatggatagtattatcaaataatgaaaaagaaattacattgatgaaatatttacctttaagtgaaaaattatctcattgtagtagtaatgacagtactttttgtagtgaaagtaataagtataaatggagtaattcttatataaactattatcttaataatgactatattaattcatttaaagactatgatttagttagctatgatatatgtgatgatattgataataagagttgtgatggtgaatattgtggtggatacactcgtgaagaaatagaaagtaataaatggagttgtagtatatatactaagagtaaaataagaattataaattattatgaatttagtgttcttgcgaataaatatagtgatatgtcattatttaagggtagttattggatgagtgatattagtaatgataaaggttattcagtttcaaatactgatgtatatatttatgaagactataataataaattagatattagacca

SEQ ID NO: 2538 - DNA, 1752 bp, Clostridium sp. CAG:524
atgaaactaatatatttaataacaggtataatatttttaatatcattactaattaattttaaattaaaaagaaatagtaaaataaagtcaggaaatttattcttttgtttatctttatttatattaattggatatattttagaaatagtaatttatttactttcaaatactattggttcaagtaatataattatagatatatataaaaatttatactatatatttactatatcatggtatttaatattaaatacttatatattcattataacaaatactaaaaatactaaattactttatataatagaatgtatcatacttataatattatcgataataattacattatctaagaatagtatattagtacttgctatatcaatattaactataaatattgtttcattgatacaagtaatattaaatcataaaataataaaagttactaaatcaaatagtatttattctatattaatattattatttgtattaactatattacaatttaaatttactagtgttttagtaccaacaactataatgttattcataacgtatttaatatatatgtatattgaaagtccttctataaaagaatataatatcataaatgaattaagagttaatgcattaaagaaagatatgaataaaactaatttcttaagtaatatatctcatgaattaagaacaccacttacatcaataattaattctatagaatatatgagtatgcatactgataatttatcaaatgagataaaagaaagtataaatgatcttaatgatgcctcttcttcattattagatttagttggtaatgttatagatataaataagatagaaaataaagaactagaattaaaagaaaagaattatgatataagaaaagaagtagaaagattaatactattaaataagaaaatgtctagtaaaaaagatgtagtatttaaatattcaatatctgaaaatactccgaatgttttatatggagataagactaaaataaaagaaataataaataatttacttactaatgcatttaaatatactgataaaggaactattactttaacaataaatagtgttattgaaaataatatatgtaatttacaaatagaagtaaaagatactggaataggtattaagagtgaagacttaaataagatatttagtaaaaaaggtatagataatgatattaacagtgatgttgatagagatggtataggattattagtatcaaaagatttaatatatttaatgaatggtactattaatgtaagaagttattatggcagcggtagtgtatttagtatagaaataccacaaaaaatatcaaatgtagtagataataattctaatgataacaatattacatatgataataaaactatattacttgttgatgatgatgaacttaataataaagttttatctagattactttctaaatataatataaaattatcgacatgtaaaaatggtagtgaatgtattgataaaataaataataatgaaaaatatgatcttatatttatggatataatgatgaaagatatgaatggtgttgatacattaaaagaattaaaaaatataaataattttaatactaaggtcatagcttttactgctgatgctcttacttcatctaaagacaaatatataaaatatggatttgatggttatatttctaagccatttaaaaaagaagatttagaaaaaatacttaatgataatttaataaataataaataa

SEQ ID NO: 2539 - DNA, 291 bp, Clostridium sp. CAG:524
atgaaatatttaaaaaaatatggcttatctcttaatgatataaaagaaatagaagaatcacttgatgatatggatttaaatttattatatgttaatgaagataaagtaataagtattcttgattatcttgtatctataggatttactaatataaaagaattacttatgtataaatctaatctattttatattaaattagatgttattattgatagaataagtaaagataaagagaatattattaaagaaataaatgaagatgtatcttatttagataaggtagggttataa

SEQ ID NO: 2540 - DNA, 699 bp, Clostridium sp. CAG:524
atgataaatctaattaaaaatgaatttataaaactaggatttaaaaaacaatttatatcatttattgtattaacaattataatcataattaactattttattaacaatgaaaaattaagtgtggataatatgtttactcttataccttttataggaataattatatcaatattatttagtggtatcattagtgaagaaatagattctggtacttttagattttatttaacaaagcctgttaatagaactaaaatttatatatcaaaattgttaacaattataatttttacttttgaattgttaatatatacattacttatccacattatattgaaaatagatgtaaaaaatgttaataacttctttataactagcatttcgttagtatttatatcaacaattataatgttattaagtacatttattaagaatagaagtattacatcaggaataagtatattgttattaacatttggaattactataactgaactattactttctaaagatattaacattgttaaatatacatttttaccatatatagatttaaactattataataataatttaatagatacgataaatcagttatatgatattaatttgtcattaaaacttggtataccaatattaatattttatagtacgttatttatcattattggaattaggatatttaagaaaaaagacatataa

SEQ ID NO: 2541 - DNA, 537 bp, Clostridium sp. CAG:524
atgaaagagaaagtaaataaaatattattaaatgagtatattataaatagctcagatttattagaaataactaacagtagtgaatttctaaatatgattaaaaatgttgatattaataaagaaataatagttaaaagtaaactcattcataaaaacaatatttctttattagaatctatattatttggcatagataattatttatcatttttaaaaaatatattaaatgttaaccagttagaaataagatatatagctatgctcactatctttaatgataattatttatttggtgataaatattattatgataatatagaatattttaataatatttacaaagatattataatgaataaatatataaagaatgtaaaatatttatctaagtataagaatattaatatttatacttatgaacaacttattaacaaaataaacaaaaataaaaatagagcatacatttattttgaagatataaatcaaaataatgctctatattatttaaatatctatgaatataatgattctatttag

SEQ ID NO: 2542 - DNA, 909 bp, Clostridium sp. CAG:524
agtccatatgtagctaataatcatcaatattataatgcacttgatttagttaataaaaagataagtattcttattgaagaaaaagatttagataaaaatacacttattaaagcaatagatgaaatatttgatgaaaatactttaaaagaaataaaaagtaatttaaaagaaataaaagacgtagcatctagtactttaatagtaaataatataaaagcaatattaaaggaaaagaatgcaaaaaaggttaagagaaaattcaactttaagaaattcttattctttataatatttctattcttattatatatgggactttcatacttattatctatcaagacaaaaaatatagttatattaaataatagttattatagtgatgatgatataatttatactgctaatatagaagattatcctaagtttattctattaaataaaagtaaaataaaagataaattattaaaacttgatttaatagaagatgttactattaaaaagaaatatggatttattttagaaattgatgtcaaagaaaagaaaatactttattatgtaagaagtactgatacatataaagcatctgataataataattataaacttgataatataataggtgttcctacgttaattaattatattccagaagatatagagaaaaactttgttaaaaagttaagtaatgtagataagagtatacttgatatgataagtgaaatagaatatagtaagacttcatatgatgataaaagattcctactttatatgaatgatggtaatatggtctatattactgtatcaaaagcagaacttttaaataaatatgttgaaataataaaaaaggttgataataaaaagggtatattatatttagatagtggaaactattttgaaattaaagagaag

SEQ ID NO: 2543 - DNA, 798 bp, Clostridium sp. CAG:524
ttgaagaagatatatcagtatttcgaaaaattatataatgaagataaaataagtcaagcatttctaataggaaatgttgtttttgatgatgttaaaagtgaattagaagaaacattgaatagtttcttttttcaaaataatataactttagaagaaaatcctgatatttatttgctaaaaactgaagatgggtacgtgagtaaagacaaaatcaaagaattattaaaaaacttatctacaacatcacaatttaacaacacaaaagtatatattatagaagacacagaaaaaatgagtgatacagtttataatgcaatactaaaaacattagaagaaccaagtcctggcatatacgcaatacttctaacaaataatatagatgcagttaaaccaaccatcgttagtagatgtcaaaaaatatttgttaatgctaataaagaaaaagaaacactagaagaaaatacaaatatagaatgcgatgaaataatagaaaatttagaattaaatggtgttgaatcaatagctaaatataataaaatttataccataattagtgatagagataaatttataaaaatattatatgcaatgctagatagatataaaaaagtattatatgatatagttaatgaaaaaaatgatgaaaaaaatgatataatatatatgaaaaacgacataaatactctatcaaagaagatacttattattgataaatttattagtttatcagcaaattatttaaataaaaacttaatgatagatagatttattatagaaatgtggggaaataataaatga

SEQ ID NO: 2544 - DNA, 756 bp, Clostridium sp. CAG:524
atgtattctaggaattcatttggttcatattatccaattgattcttcagtacatagactaaatcctattattaaattaattgattttcttataataatatttttagttatattttgtaattcattatatataaatttatttatgctaggacttgttattataatgatgttacttagttttgtacctttgaagttttatatgaataccttttggtctttaagatatatttatattttagtagcatttatatgtgctagtatgagaatgaatatgaatggttacttaactatatttgccaaaatagttgtagtagtagaatacttaaatataataagctatacaacttctcctagtgaaagtgcttatggaatagagaagtttctagcatgctttaatatattatatttaccaatatcaggacttgcatttaaaataaattcaatgcttagatatgttccactttatatgaatgtagaatataaaactttaaaagcacaagcttcaagaggaatagattattatcatactaatatttttggaagaatgtatgctgttatgagtttatatttaaatgtacatagacttacaagaagaaagaatagagaaattgctttatcaagagaacttaaactatttaatttaagacgttatagaactaattatagaactaataaagtaggtttttatgatatattttttacagcatttcatattttattaatacttgcatatttaaaggataaaggtgtaatatga

SEQ ID NO: 2545 - DNA, 507 bp, Clostridium sp. CAG:524
atgaatatgaaaaaagatggatttgtatttgtagaaagcgtaacagtgttaatagttgtggcattatcacttactatgtcattatctagttatgaattattatcaagtaaatctaagcaaagaaagtattatgatttagctagtgataaatatttattatggactttaaatgaacttggtaataaaacaggttcaagttatcaaaacaatatggttgcttctaaagataattgttctagtacaactatgggaactgtacttagtaattgtgtacaagtatttaaggatactgatttagtttattttataaaaataaatgatgtagaaaaggcacttaaaaatgatcctagtagaggttattatgctactaaaacttatgataatggaacaatagaatatttaaaaactttaaaaagaaaagaagatgataatactacacctattaattatatagttggagtgttttatagaaaaggaaaatattattacgcatcaataatattatag

SEQ ID NO: 2546 - DNA, 744 bp, Clostridium sp. CAG:524
atgataatttttatagttattgaaaggagtattatgatagaattaatcgatatttattttgaaagagataataaaataatattaaatgatataaatttgaaacttgaaaagaataagttttattcattgactgggcctaatggtagtggaaagagtacacttgctaaagtcataatggggcttacgattccagataaaggtaaaatcttgtttaatggagaagatattaccaacaaaagcattgatgaaagagctaaacttggaataggatttgcatttcaaacaccagtatgttttaaaggaataactgtttatgatttattaagtgttgcttctaataaaagtcttactaaaaaagaagcatgtgatatattaagtaaagttggactatgtgctttagaatatattgatagagaagttaataaatcactttcaggtggagaacttaagagaatagaaatagcaagtgttatcgcaagagatcctaaatttgctatatttgatgaacctgaagctggaatagatttatggagtttcaatagtctaaataaagtatttaagaatattcaagaaaataatgatgcgactactttagtaatatcacatcaagaaaaaatacttgatattgctgatgaaataatacttatggaaaatggaactattaagaaagttggttctaaagaagaagttatatctaacataaatagtaaaccatgttgtaaagtaggtgagatgaatgaataa

SEQ ID NO: 2547 - DNA, 714 bp, Clostridium sp. CAG:524
atgaaagaatttgatagttttttagaagcatttatgacaggagattattttttaatatttttaatattaatgttaattatattagttgtgcttgttttagcacttgttaaaacacgtaatgattacatggaagtaataacaagagaagaaaagaaattagattctccagacttcctagaagatttaacatcattaaagactagtatgaaggatgaagaagaaaaagatatatttgaaagtattaaagaagattcacatgaagaagatttattcgaaagtctaaaagcagatacaaaagaagatactattgatgaaaataagccattaattaaacaaatagatgttcctaatgtaatgacttatgataaagttatagatgaatatgaagatagtgaagaatcaaatgctgttatttctacagaagaacttgaaaaagttactagagatagaatggatactttaggacttaatgataatcaagcagcaatagctaaatatgaagaagaacaagaaaagaaagcaataatcagctacgaacaacttctaaagaatgcatcaaatatcacattatcatataagaaagagaataatgaaaagggttgtccaaaaataaataaaatagaagttaaagagaaagaggtaactcaagcaataagttatttagaagaagaagaattcttaaaaatacttaaagagtttagattgtcgttataa

SEQ ID NO: 2548 - DNA, 942 bp, Clostridium sp. CAG:524
atggaaaataaaaaaacaatacttactttagttatatgtttaatattagttggaataggtacaataataaataacttagtttttaaaactgaagataaaatagttgataaaggtaaaaattataatgaacttgttagtcgtggatacacattagctgatttaaataaaccatcaaagcttatagatggctataaaatatatactaaaaaagataatgattacttaaataataatgaaaaagtaacaatattagtagaaaataatattgcatattttaaatatcttgaaaataaatatcaaattaatgttgagaatgttattgattattatatgtatgttaatgataatacaatgcatatatacctacttagtaatgattataaaatatattatttaaattataaaattaatatcaatgatgaaatattaaatacaatagacttaatgtgtaactcatttaaattaattaatactgataaaaatatagttagctttaaaaaaatagttacaatacataaactattagataatacaaattatgaatatttagttggagtttccaatgataaaaaagagtataagataaataatgaaactctagaagaaataaataattattatgatagagtatactattataatgatgaagtgtatgtagacgataaaaatgaacttatgatatctgatcaagatacactctttaaagtaaaatatatattaagtaattattttgtttcaaaagataactatttatataaagttgataataaaaatataactaaagaatataatgaaaaaatacaatatatgttttattataaatatgatagtatatttaaacttgcttttatatttgaagataatagtatgaaacatattgatttaataataaaagattatggttatgaaatacagggtatagatattaaaacaaaaaaatag

SEQ ID NO: 2549 - DNA, 459 bp, Clostridium sp. CAG:524
ataatattaatggtgaatgaaatgaaagagaaaaatgagttattaatgcatatttatgatatatcatatatgggaagttatagtactaataaattattaacaacgctaaagaacaaggataataaaattaagaaattactcgaagatgaattacaagtatatgatttatataagaaaaagagtgaaaaattaattaagaaggctaaattagaactaccagctcaaaatataatgtcaaaaatgatgagttctatgggaataatgatggagactatgaaagataatagcgatgccgctattgcaagtatgcttgccgaaggatttaccatgggaatagttgaaatggagactaaaataaagaattacagggaagaagtagataaaagtactttgaaacttgctaaagaattattgaaatttcaacaaaaagaaatagaaaatcttaaaacatttatgtaa

SEQ ID NO: 2550 - DNA, 687 bp, Clostridium sp. CAG:524
gtgaaaaaactacttgttagtgactatgatggtacatttaatattcataataatagaagtgttattgatagtaatattgatgctgtaaaaagatttatagataatggtaatatattttcacttgcatcagcaagaagttttaattcacttaaaagagaaatagataaatataaaataccatataattatttagtgtgtaataatggtggtgttgtatttgataaagatgacaatataatattctttcatcctgtacttaatagttctttattaaaaacattaaaatatttaaataaattaggtatattaaaacgtatattattcaaggacttttatggtaatataacaactgatttaaacgaagtatgtgatattatttgtactattaatacagataatttagataaattaaatcaaatacaagaagaattaaattatttatgctctactccattctttcatttacttgtttttagtgagaagatggataaagttgatggcattgatattatagcttgtaaagaaagtataactgaagaagcaatatatacagttggaaatgatttttttgataaaaatatgttattaagatataatggatatagaatgattaatagtaatccacttctttatagaaatggtattaggaaaactgcatcagtaaaatcattagtaaggagattatag

SEQ ID NO: 2551 - DNA, 3306 bp, unclassified Faecalibacterium
atgctccaactcaaacacatcaaaaaagaatacaagaccggcgatctggtccagaaagcactggatgacgtcagcctgaacctgcgggacaatgaatttgttgccattctcggccccagcggttccggcaagaccaccctgctgaacatcatcggcggcctggaccgctacgacagcggtgatctgatcatcaacggtgtttccaccaaaaaatacaccgaccgcgactgggactcctaccgcaaccacaccattggttttgtgttccagagctacaatctgattccccaccagacggtgctctccaacgtggagctggcactgaccatttccggcatttcgggtgcggagcgccgcagccgggccgccaaggcactggaacaggtgggtctgggagaccagctgcacaagcatcccagcgagatgtccggcggtcagatgcagcgtgtggccattgcccgcgctctggtgaacaatcccgatatcctgctggcggacgagcccaccggtgcactggacagcgagaccagcattcaggtcatggagctgctaaaggaggtggccaaagaccgccttgtggtcatggtcacccacaacccggagctggccgaacggtatgccacccgcatcgtccgtctgcgcgacggcatcatccagtccgacacggcccccttcctgccggacgatgccgtgctggccccgccggtgcacaggaatctgggccattcctccatgtctttgctgacggccctttccctgagcttcaacaatctgctcaccaaaaaggcccgcaccctgctcaccgcatttgccggttccatcggcatcatcggcatcgcgctgatcctctcactctcggccggtgtgagcaattatatccaggacatggagcgttccaccctttcggagtatccgctgcagatcacctataacggcattgaccttgccgccctgctgaacccggagagttataccactgccgttgccgataccaccggcgtcggcagtgtatcgtcctcttccgccccggagggaatggtcacagtgcgggagctgctttcccagctgaccgaggacacctccaattccaacgaccttgcctccctgaaagcctatctggacagcccggactgccctatcccggaggacgctgcttccatcgagtacacctacggctcctacccgctcatctaccgccagaataaggacggcaccgtgcgtcaggtgtatccggacagcaccatctcttccctgagcaacaccgcctctgctgccggtatcgtctcctccatgaccaaccagaatgtgttcaccgaaatggccgaggcaccttctctgtacgagaaccagtacgacgtcaaggcaggccgctggccgaatggtgccaacgaagccattctggtgctgaacgcagacggcagtgtcagcgactatgcgctttacctgatgggcattgaggatgaaaacgtgatgctgcgttttctggaagcatattccagagacaaaaacactcctgcgcccaccggttacagcacctatccctacgaaacctttgtggggctgaagttcaagatactgaccctttccgacctttatgcctatgacgaggaacgtcagatctggcgcaaccagtccggcgatgaagccttcatggaacaggccgttgccgacagcccggatctgaccatcgtgggcgtcgtccagcccaagccggacgccagctccaccatcctgcccaccggcgttgcctattcccatgcgctgacctattacgccatcgaccatgccgccgagagcgaggtcgtaaagcagcagcttgcccacccggataccaacgtgctcaccggtgaaccctttgacacggagcagcaggacaagagcagccttgatttttcctccctgttctctgtggacaccgatgcgctgaaggatgccttccagttcgacgccagcaagctgcagtttgacctgagcggcgcgttcaatttgacgaacggctccttcgaccttgcgtccatcatcgatccgtcctccttccagctggatatgaacgatcttgacctgagcgacatcgacctgagcgatgtgcagctgccggagatggattcgctggatctgagccagctgttcgcggacatggacatgtccgtttcgcaggatgcgctgcaggagctgatgaagaacgtcatgaacggctacaagcgctatatcattggcaacggcatcctgaatctggacaagatcggtttctcttcctatatggagagcgacatattcaagcagatccttgccgagtccatgggcagcctgctggatacctccggcctgcaggatcagttcactgcatcgctgcagcagaacctgcagggcatcatggcccgctatctggaaagctattcccagcaactcacccagaagctgggcgaagccttgcaggaaaagctcactgccgccattcaggctcagatcggcaccgtgatgcagcagctgatgcgccagctgactgcgcagttcagccagcagctgcagaccgcgatccagaagaacatttccaagctcagcagtcaggtggaagacgcactgcagatcgacgctgcggtgttccagaatgccgtgcgactgaacatgagcaccgacgatctggtggatctggtcaagctgaacctgcagtccggctccaccacctacaacagcgtactgggctcgctgggctactctgattacgcatcgcccggagccatctggatctatcccaacagctttgaggccaagaaccgcatcgtggaaaacctgaacgcctacaacgcctccatgcgcgagcagggacaggacgacaaggtgatcgttttctccgacacagtcggcaccctgatgagcgccgtgaccaagatcgtgggcatggtcagcaacgtactggtggcctttgtggccatctcgctggtggtctcctccatcatgatcggcgtcatcacctatatcagcgtgctggagcgccgcaaggagatcggcattctgcgtgccattggtgcttccaagcacaatgtctcgcaggtgttcaacgccgagaccttcatcatcggtctgtgctccggcgtgattggtgtgggcctgtgcctgctgctgctgatccccggcaacatgctcatccattccattgccggtaccaacagcgtcaccgccgtgctgccgcccagggccgcattgatcctgatcgtactggccaccctgcttaccatcctcggcggcctgctccccgcccgcagcgcagccaagtgcaatcccgttaccgcactgcgctccgaataa

SEQ ID NO: 2552 - DNA, 2613 bp, unclassified Faecalibacterium
gtgaatcaggtacgggaaagcgtgcggcagcgcacgctttttcggttttatgcccctttgcaaaaaaacttcaaatccaataaaagtgcggcgggaagcagaaactgccttttgccgcaggagcataccatgccaaaatttttccgaaagatcaccaaaaaaataaaagggccatggccggataccggtgccggtgcccgcatgaaccccaagatcagcctgctctgcggcagtctggcccttgcgatcatggggcttgcggccatccgtgtgacctacagcctgtataacatccagatccggaacggcgagacctatcgtcagctggcggcaaagcagcagctgctggataccaccatcaaggcgacccgcggcgagatctatgatacctccggcatcacgctggcttccaccagtgtggtgtggaccatctgggccgacccggacaacagcaagatcctgtatacctctaccggcgaggaggacaacgaggtgcgcacactggaccccgccatgtgcgccgaggtgagccgggagctgactctgcgcctgctctccggcgacggtgagagtctggatgcggtggatacctcgtcggaggcgtaccagacccagtaccagaaggtctacgatgcactttccaaaaccgacaccaggtatcaggtgctggccaccaaggtgaacaacgccgtcaagctgtccattgaatcgtatgtttcgcagttcaataaggcgcacaagcgtgccaatggcacatcccgcaagggaaatatctcggtgggcagcgagaagagctttcagcgcaattatccctacggggcatttgcggcggcggtgctgggctttacggatgccgacggcatcggcacctacggactggaaaaatcctatcagtccacattggccggtgtggacggccgcaccatcaccaagcgcaacgcctacaataatgccattgcggacgagaatgccaccacctttgccgccaaggacggcagcaatctggtgctttcgctggatgtgaacgtgcaggagatcgtggagcggtatctgaacgaagccattgcagccaacacagtggagaaccgcggcgcggctatcgtgatgaatgtcaagaccggtgccattctggcaatggcctccaagccggactttgaccccaacgatccgctggattacagtgccaatctggattatctcaacgagctggtgcacgccgagccggagctgtacggcatctacaaaaaggatgaaaacggcaacgagctcaaggacgcaaacggcaaccgcattctggacgaggaagcggactattccggctacttccgggatatccagtggaagaacaagaccatcaccgagctgtattaccccggaagcgtgttcaaggtgatcacctcggccatgggcgtggattccggtctggcgaatatcaacaccacctttacctgcgccggtgcctacggcgtggccaaggagacctaccactgtgcaggccacaaggcccacggcaccatcaatctggccgatgccctgcgccagagctgcaatatctattacatccagctgggccagaggattggatctcagacgttctacaattactttgacgcctttggctttaccgaccgcacgggcgtggacctgcccagcgagaccggttttatgcagtactacaagggcagccagctgggcgaagtgcagctggcatcctcggcctttggtcaggccatggcaatcaccccgctgcagatgtgcacggcggtggctgcagcggtcaacggcggctatctggtcacgccccatgtcgtggataagatcaccgatgccaacggcaacgtcattgaggagatcggcgccaatgtccgccgtcaggtggtcagcgagagtaccagcaacgtgatccgccagatcatggaatatgaggtgggtgccggtaccggcggcggcaagtacgcatatgtgtccggctaccgcatcggcggcaagtccggcacttccgaacagctgaacatggaccgccgcgctgatggcgactacaagaaggtggcgtcctttgccgccgtgctgcccgctgacgacccggagatcatcgtctatgtgatgctggatgaccccaacaacgccagaacggactattcgtctctgctggcggctcccgttgtgggcaacatcatcagcgagatcgcgccgtaccttggcattgccgccgacggcgaggaccgcagccagacggtggtcacggtgccgaatctggtgggcaccgagtggagcagcgcacaggtgcagctgaacatcaagggcctcaagcatcagctgaccgaaagcacagccagtcaggcggcagcagctgttacctaccagtacccccatgcaggtgcaaaggtggcctatggcaccactgtgtatctgtataccgatacctacgagggcagccataccgaggtgccggatgtgaccggcaagagcgcggactttgcccgccagatgttgtccgctgccggactgaactgcgtggtagaggggaatacaggcggcacggtgcaggcgcagagcgaggagcctggctccagcgtgcagcgcggcaccattgtgaccattacctgtggataa

SEQ ID NO: 2553 - DNA, 3519 bp, unclassified Faecalibacterium
gtgagcgagatcagtgagaacaaccgtcttggaagggacttcgttcatctgcacatccatacggaatacagccttctggacggtgcctgccgcatcgaccagctgatggagcgcgtaaaagagtgcgggcagaccgccattgcctgcacagaccatggcgttatgtacggctgcgtgcagttttacaaggcggctaaaaaggcaggcatcaagcctattatcggctgcgaagtctatgttgccacccgcacccgctttgataaggtgaacaagatcgatggcaataaccatctgatcctgctgtgcaaaaatgagaccggttacaaaaaccttatcaaaatggtatcggcctcttttgtggagggcttttactccaagccccgcatcgataagcagctgctggagcagtatcacgagggactgatctgcctgtctgcctgtctggccggtgagatcccgcaggctattctggcaggcgactatgagcgtgccaaaaccagcgcgttgtggtaccgcgacctgttcggcgagggcaactattacattgagctgcaggatcacggactgaaagaggacaacatcgttctgccgcagctcatcaagcttgcgcgggaaacaggcatccccatggcagccaccaacgactcccactatctgcgcagggaggatgccaagatgcagggcatcctgctgtgcatccagaccggtaagaccattcaggatgcggataagatggagttccagaccgacgagttctatgtcaaaacgacagacgaaatgtacgagctgttctccatggtgccggaagcctgcgagaataccgccaaaattgccgaacagtgtaactttgattttgattttggacacactaaaattccatattacaaagcgccgaacggtatggataatcaggcgttttttgaaaagctctgctgggagggtctggaacgccgctatgggcctgatgtaccgcaggccaacaaagaccgtctgacctacgagatcggcgtggtcaaaaagatgggctacacaaactactacctcatcgtgtgggactacgtcaactacgccaagagtcagggcatcccggtgggcccgggccgcggctccggcgcaggcagcattgcggcttacagtgtgggcatcacggatatcgaccccatccgctataatctgatctttgaacgctttttgaacccggagcgtgtcagtatgccggacttcgatgtggatttctgctacgaacgccgacaggaagtcattgattacgtcaaccgcaaatacggtgctgaccatgtggcacagatcgtcaccttcggcactatggccgcccgcaacgccatccgcgatgtcggccgtgtaatggggatcccgtatcagcaggtggatgcggtggcaaaacaggtccccatggaactgaaaatgaccctgaagcgtgcgctggaggtctcgacagagctgaagcggatgtacgacaccgatccgcaggtcacggagctgatcgacacggccctgaaggtggagggaatgccccgccatgcatccacgcatgcggcgggcgtcgtcattaccccggagcctacggactactatctgccgctggccaccaatgatggcctgcccgtgacccagttcaacatgaccgagatcgaagagcttggacttctgaagatggactttctcggtctgcgcaccctgacggtcatccgcgatgcggaaattgccgtgcagaagcacgacccggaattttccgtccagaagctggactatgacgacccggacacctacaggatgctggggcagggcgataccgagggcgtgttccagttggaatcctccggcatgaagcaggtcctggtgggcctgcagccgcagaaccttgaagatgtcatcgctctcatcagcctgtaccgtcccggtcccatggactccatcccgacctatctacgcaaccgccacgagccggataagatcagctacaagaccccgcagctggcgcacattctggacgtgaccaacggatgcatcgtgtatcaggaacaggtgatgcagatcttccgtgagctggcaggcttctcgttcgggcaggcagacaatgtccgccgcgccatgagcaaaaagaagcacgcggtcatggaggcagagcgtgagcactttgtgcacggctgcaccgaccccggcaacgaatgcccgggctgtgtggcaaacggcatttcggaaaaagtggcaaacgagatctacgacgaaatgtccagctttgcctcctatgcattcaacaaaagccacgctgcctgctatgcctatgtggcatttcagacagcctatctcaagtgccattaccccagcgaattcatggctgcattgctgaccagcgtgctggacaacaccgataaagtcatcgagtactccggtgagtgcgcacggcttggaattaaggtgctgccgccggacgtgaatgtttcaaacggcggatttacggcagatgacaacggtcagatccgttttggactgaacgcggtcaagaacgtgggccgcaaccttattgagaatgtggtcagagagcggcagaataagccctacaccagcttgtacgatttctgcaagcggatgcatggcacagaattgaaccgccgggcggtcgaaagcctgatcaaggccggtgcctttgaccatatgggaagcaaccgccacagtcaggtggaggcggtggaaggcattctgaaaagcatcgaaacagccccccgccgcaatctggacggccagttggatctgttctcggtcatgagcggggaagcgcaggatgaagcatctgcggacagctatgagatcaaacagctgtcggaatacagccacaaggaactgctgcagcaggaaaaggatgtcagcggcctgtacctgtccggccatccgctggacgcctaccgtgagcagtcggcgcggatcgcgtcccactccatcaaggatctgaccggcgaggatgcccatgtgaaggatggcgaaagggtgcgcatcgtgtgtgcagtggtaaaaagccgcatgatgaccaccaagtccaacagcatgatggcctttaccagtgtggaagacctgaccggtacgatggaggtgatcgtgttccccagagtgctggataccttccgcgattcactgcacgaaaatgcggtcgtcgtgatcgacggcaagctttctgtgcgagaggacgaagcctccaagctgctggcagagagtgttgtccccattgaaagctatgatccctcccggccggacaagggccgcccggacccgatgcggaaggctgcaaaaaaactctatatccgtgtgccgtcccgcagcagcagggaatatgcaaaggtggtaaatcttctgcatattttcgatggcgatatgccggtgcttctgtacctgatggacaccaagcagtatctgcaggtgccgcgtcatctttacacttccggccatccgctgctgtttgaagaactggaaagactggtcggcacagacaatattgcaacaaaatga

SEQ ID NO: 2554 - DNA, 2334 bp, unclassified Faecalibacterium
atgcgttatacctacgtccggcagcatgacactaccgactgtgcggctgcctgcctcgcaatggtgtgcctccattacaaaaaggaagttaccatcacccgcctgcgcgatatgatgggtaccgacctgaaaggcacgaaccttgttggtttgcagaaagccgctaacgagttgggtttttccaccgcagcggttcgcgtggaccgtgaaaatttcctcagcgatttctctttgccctgtatcgcacaggtcattaccgaccagggtctggcccactttgtggtggtctttaaaaagaccaccatcaaggatgagggtgagcgccgcaagcacatgctgaaggagtcggaatctgccaaggaagacgagaagaacggcaaaaagcacaagtgcaaggactatgtcatcatcggcgcccccgccacagagctgaaaaagatcagtctggatgagttctacaagaactttacgggcgttctgctgctgatgaaccccacctcggagttcaagggcggcaaggtggaaaagggcggcatgttcaagcgctacattgatctgctgctgccccagaaaaagcttttcttctatgcaatttttgcctctctgatcacaacgatcctcggcattgcatcctccatgttcaacaagatcctgatggatgaggtgctgccctacggattgaataatctgctggtcacactgatcctcgtgttcagcatggtcagcctgaccaatactctgatcggttttgtgcggcagtgggtgctgatccatctgtccatcaagatcgatatcccgctgatgatgggttacttcgggcacatcttccacctgcccatgaagttctttgccacccgcaagactggtgatatcaccacccgttattcggatgcaaacaccatcaagtccatcttcaccagcattgcgctgagtctgatcatggatatctccatggccatcatcaccggcatcattctgttccgcatgaacgcgatgctgttctccatttcgctgttcatggcgctggtcagcatcctgctggtgctgatctacaagcagccgtataagaagatcaacgaagagaccatggtgcagtctgctgcactgaacagccagatgatcgaaagcctgcgcggcattgagaccgtcaagtgcaacgccaacgaggacaccgagctggaaaacctcgagcgtgaatacatcaagagcctgaagatcagcctgcgttccagccgcatcagcaccacacagggtctgatctccgccttcatctccatgatctttggcatgctgaccacgtatgtgggcatcagtcaggtgctgaacggcgaaatgacgctgggcggctatatggcattcagcaccctgtcttcctacttcacttctccgctgagcaacctgatcggtctgcagatgcagatccaggaagccaacatctccatgaagcgtctgaccgagatcatggactatccttctgaaactgccggtgacgaggatcgcacggatctggaaaaggtggagggcgacatcgagttcaaggatgtcaccttccgttacggcaaccgtgctcctgcactggatcacatcagctttaccatcccggccggcaaaaaggtggctctggtgggcagcagcggcagcggcaagtccaccatcaccaagcttctgctcaagtattatgagccggaggatggcgagatcgacttcaacggtgtgaatctgacggaatacaccaacgattctgtccgccgcgcaatttcctatgtgccgcagaacgttgagctgttcagcaagaccatctatgacaacattcgtgtttcccgcatggatgccaccatggacgaggtcaaggaagctgccaagaaggccgatgcgcacgactttatccgtcatctgcccctgcagtacaacacctatctggaagaagccggcaacggcctgtccggcggtgagaagcagcgcattgcactggctcgtgctttcctgaaggattccaacctctacattctggatgagtccaccagcaacctcgactttgcaacggaaaacctgatcttcaacatgatctatgaccagcttgcggatcgttccatgctgatcgttgctcaccgcctgtccactgtccgtgactgtgacatgatcctggtgatggatcacggccagatcgtggagcgcggcacccatgaggagctgcttgccaaggaaggcagatactacgagctgtggaacatgcagcagggtatttaccgcagcaagaaaaaggcagaacccaagcagcctgtcatgcaggctgtcgtggaagaggatgacgacggcgagtcgatcacctattga

SEQ ID NO: 2555 - DNA, 2547 bp, unclassified Faecalibacterium
atgaagaagatcaaccgctccgacaacggacgccctgctgcgcccagaggccggagggtgaatacgagcaacagccgccgggaacctcagcatgccccccggtccggacgggaaccggaggagctgcaggaatcccgtgaaaagaaaaagcatccgctcctgcggttcattggccggaccattgccaccctgctctgtctgggcgtgatggcaggcagcctgctggctgtgggtgccgtctattacgtggtgcaggccacggctaatgacggcgatttgctggatctggataacattgaactgagccagtccagcgtggtgatggccaccgacccggacactggtgcacaggtggagtacgcgaccctgcgctcctccaacagccaccgcgtgtgggcagatctggaacagatccctgccaacctgcagtatgcgttcatctgcacggaggataaggatttctacaatgagcccggcgtcaacttcaagcgcaccatcggcgcaatgatcaatgagtatctgctgcccatctacagctccaagcagggtgcgtccacgctggaacagcagctcatcaaaaacctgaccgatgacaacagcgccagcggcatcgagggcgcactgcgcaagctgcgtgagatctatcgtgccctctgcctgagccgcagctattccaaggagaccattctggaagcgtacctgaacaccatcagctttaccggtacgattcagggcgtgcagactgcggccaacgagtactttaataaagatgtcagccagctgaccctgtgggaatgcgcatccattgcgtccattaccaagaaccccaccaactacaacccctatacgaatcccgaaaacctcatcaaccgccgcaacttcctcatgtacaacatgtggcagcagggcgtgatcagtgaggaagagtaccgcaatgcagctgcccagccgctggtgctggccgaggaagaggacagcaagaagaactcttctgttacctcttattttaccgatgcactgttcacggagctggtgcaggatatcatggccaaggagaacatctccgaatccgaagcccagaagctgctgtacaccggcggctttaccgtggaggctacggtgaacaccaaggtgcagtctgccatggagaacctgatgctgaatgccaacgacgcatatttcccggcgggctggcatgaggaagaggtgacctccatttccgatgacgacgttcaggtgatgaatgacgacggtacccccaagactcgcaccggcgatgacggcacggtctactattatcgcaacgtccgcacacaggcggcgatggtcacgttggactacgacggcaacgtgatcgccattgtgggtggtctgggcgaaaagaccagaagcctctcgctgaaccgcgcttacagcgtcacccgccagacgggttctaccatcaagcccattggcgcgtatgcactgggcattgaatatggtctggtaaactggtctaccatgctcaacaactcgcccctgtaccagaagcaggacatggtgatccgtgatgaggactactgccgcaagaacggcctgatgggcctgtcggacaagcagctgcgtgcttaccccaacgcatggcgcagctggccccggaactacggcggcaattatggcgaccacagcgatatcccgctgtggaatggccttgcccgctcgctgaacaccatcgcgatccgcgtgggcgatctggtgggcgcaagcaatatcttcaactttgtttataacaccctgcagctgaacacgctggacccggtgaacgatgtgggccttgcccagatggtcatgggcagccagacccatggtgttacgcccacggctctggcggctgcattccagatcttctacgatggccagtacaccaccccgcacctgtacacccgggtgctggatcgtgatggcaacatttatctggaaaacaatgctaccagctatcaggcactgacgccggacaccgcttacgtgatgaaccgcctgctgaagaatgtgctgtactccagcgtgggtaccgcaggcgggcgctatcccaattccaacggtatggagtcctttggtaagaccggtacggccagcgacgaaaaggatctgtggttcgtgggcggcacgccgtattatgtcaccgctgtgtggtggggctacgacgcaccctacgatatgaccaagacccttggcaagcagcaggcaaagacccgtacctgtgttatggcatggaaggcgctgatggaacaggtgcaggcagacctgccttataaggcattccccagttccgctggcgttgtggagcgccgttactgcacccagagcggtctgctggccggcggttcctgccccagcacggccgtgggctactaccgtgcagatgatctgcccgccgcctgcaactattcccatgcggcagcacccgctgcgcctgcagcagatgcagcagatgcagcagatgcagcagatgcagcaccggagcagactgtcatcccggcagatacaagtaatctggataccgagtga

SEQ ID NO: 2556 - DNA, 2436 bp, unclassified Faecalibacterium
atgagtgacgataccatttttatcaaccgggaactgagctggctggattttaatcagcgcgttcttgcattgggcaaagataaaaatgttccgcttgcagaacgggtcaagtttcttgcgatctatggctcaaatctggacgaatttttcatggtgcgcgtgggttctctgcaggagcgcgccaatctggaacaggaacagggcaaaaaggtcaagagggaaaacaagaccaacatgtccgcggcggaacagctgactgccatcatgcccaaaacggcacagctgcaggaagaatgcgacaaatactacgcaaaggcgctggaagcgctggcggaatgcggttatcgcaaggtggactttaaccatctgaccaaggaggaggagcatttctggaaaaaatatttccagaccgagctgttccccatcctcagcccgcagatcgtggataaccgccatccgttcccgttcctgcgcaacaaggagatctatctgggcgttctgctcagggaaaagcaccctgcagggcagagcctgggcatcatccccatttccagccagatggaacggatgcacattgtaaaaaaagatggcgagacgctgtttgccctcaccgaggagctggtgctgcattttgcggccagcatttttggcaaggatgccattcaggaaaagtgcctgttccgcgtgacccgcaatgcggatatcgacgtgaaagagggcatgatggatcacgatatcgattaccgtgagatcatgtccgatctgctcaagcgccgccgcaagctggcggctgtgcgtttgcagatcacaacggcatctgccccggaggtggaacgcctgctgtgcaaccgccttgtgctgacccataagcgggtgttcgtgcagaaaagcccgctggatctgagttttttctataagctcaccggcaggatcgaggcagacggacatccggaactgttctacccggcagcgcggcccatgctgccgccgccgcagtacgatcttgccgccgaggtgcagaagcatgatgtgctgctcagctacccgtaccagtctatccggcccttcattgccatgctcaaaaaggcggcacatgacccggaggtcatttccatcaagatgaccctctaccgtatggcgcgggaatcccagatcgtgcaggcgttgatggaagcggccgaaaacggcaaggaagtggtggctctggtggagctgcgcgcccgctttgatgaacagaacaacattgactggtccaagcagctggaaggagcaggctgcaccgttatctatggctttgatgattacaaggtgcactccaagctgaccctcatcacccgcaagagcgcacagggctactcctacatcacccagatcggcaccggtaactacaacgaaaaaaccagtgagctgtacaccgattattcctttatcacggccgatcccgtcattggcgaggaagcatccaacgtattccagaaccttgccgtacagcgcctgaccgaggacagcagtaagatgctggtggcaccgctgcggttcaagagcgtgcttctggaagaaatggatcacctgatcgccgccgcccgcatgggccgcccggcgtccatgatcctgaagaataactccatcagcgaccgcgacatcatcctgaagctgcaggaagccagctgtgccggtgtgcgcatcgacatgatcgtgcgtggtatctgctgtgtgcgtgcagaggtgcccggcaagaccgaaaacctgcacatccgcagccttgtgggccgttatctggagcatggccgcatttacagcttctttgatggagtgcacacccgcgtttatattgcttccggcgacttcctcacccgcaacacggagtgccgcgtggaggtgggcgtccgggtggaagacccggtgctggtgcagaagcttaccgatattctgcagctgcagctgcgggataacgtcaatgcccgggagatgcgcccggatggcagctaccagaaggtgaagcctgccgagggcgaagcactggtcaacggccagatggatatgtatgagctgcttcgggatgactggactggaaaagctcctgcctgtgaaaaaacgtcaccggcagctgtggaagctccgacggaaccgttgactgcagaagctcccgctgcagaaccgtctgcagcagaaccggaggcaaaggcggtggagttccccgtacagaagcaggaaccgcaaaaggctcccgaaccgtcggcacccatccatctggatgcggccccgaaaccggaggaacacgatcactttgacgaactggaacagatggtgaaccgcaaaaaaccggcaccccggcctgcttctgtgccaaagccggcaaaaccggccatcgctgaagcgcctgcgcagaagagccgcctgaagcagttcctggacctctttaaattccgcagataa

SEQ ID NO: 2557 - DNA, 1959 bp, unclassified Faecalibacterium
ttgaaagatctgttcatttcgttccgcagtgcaaatcagacctattctgtcctgcggcgctccgtcttttccctgatgcaccgcgccgaagctgcacttttctccattctcatcctctgcaagcttgccacaaacctgttgttcgtttccctgatgcagcaggtctggtccctgacgctgcggttcgctcccatgcactatttgagcaacagcaatgcttcggatatttttacctcccctgccattatcggctgcatcgttctcatcgccgttctgacggccttctggtcgctgtttgaatgttccgtcctgctgcatgggctggaccttgcccgcaagggcgagagcatccgcccgcctgcactgctgtgcacctccctgctggacgcctgtcatgcctttctaccgcagaactggctcattctggtctacagcgccacgctgatccctttcaccaattttttccttgccgtgaattatatcactcagcttgcagtgccggaatatatcatgggcgtcattcgtgccaacagccggtatcacctgctttatctggccctctgcgccgcacttctggttctcctgatcagctgggtcctggtgcttccgctgttccttctggagcacaaaagcctgtggcaatcggttcgtgaaagcgtcggctatgtccgcacgcgcattccccgcacatttcttctgctgctgcggtggaatgtttcggccctgctgcgttctctgctgctgactgccgccatcgcgctgccgctgtacggcattatcatcggcatcgggatgcagagcacgcaggccatgtttgcactgtcccgtgccgcgctgaccatcgagcttcccttcttccagtttctcatcgactgcaccatcacccttgcacagtgcacggttattaccgcgctctatgaccgcctgcggggtagcttatcgtttgaagcggacgcagacccggaccgcagaccctgccgctccaatggcaggttgcttctgaccgccgccattgccggtgccactttgctcaccttcgtgcttgccgcctgctactttgttctgccggaggacgatgcgctgcgctccatgctgggcggcactgtgccgatcgtcacggcacaccgcggctattccgccgccgcaccggaaaacaccctgcccgccttccagcttgccattgaccacggctgtgagcgcgctgagctggacgttcagatgacaaaggacggtattgcgatggtgacgcacgacgccaacctgcgccgctgtgccggccggaatgaaaacatttatgacctgacctatgatgaagtgcggagactggacgccgggcgctggttcggccagaagtacaccggcacccgggtccccacgctggaagaagttctggatcagtgcaaaggcaggatccagctgaacatcgagataaagcccaatgcggccacacctgagctggaggcagagaccgtccggatcatctatgaaaagggctttgagcatgactgcgtgatcacctcgcaaagctacaataccctttgcaaggtcaaggaacttgccccggagatccagaccggctatatccttgctttgggcgtgggtagctattatgacctgcccgccgcagactttttcagcgtggagtccaccttcatcacccccggcatggtccagcagatccacctgcgcggcaaaaccatctctgcatggacggtcaaccgtcaggaagacgccagcgatctgctgagccttggcgtagacgacattatcacggacaaacccgaaatggtccagcagctgatgaatgccgatgccgatctggacaacgatctgctctttatccgcgacacgatccgcagcctgatcggatggttcgacgctggggacgagcccacgccggaggaagaggtgatcgaggaagcgatcgaagaccccgaagagctgctggatgcggcatga

SEQ ID NO: 2558 - DNA, 2259 bp, unclassified Faecalibacterium
atgactgataaccctctcaccggcacggtccgcttgaagcggcgcaatgccggagctctcccaaagggcgagcccaaaattaaggaggcaactatgaaaaaacgatttctcgcactgctgctggcggtgtgcatcggcgtgtccgtgctggtactgccggcttcggcagcgggctccaacacggcggtgcagacggcggtgacgctaggcgctttctccaccgaggaagcggccgggctgagcacgccgctcacccgcgggcagctggcaaagctgctggtggccttttctgcctaccacgataacgccaatacgcagggcagcatcggcaccctgtataccgatgtgaacggcagcagcgcttatgcgccctatatccgcattgcagtgcagcagggctggatgagcggctacaccgacggttccttccgcccggataataccgttacgctggaagaagcctgcactgccgccctgaccctgctgggctacgatatcaccaccctgaccggcggttttccggcagcacagctgaacaaggccaattccatcggcctgcggagcaatctgggctgcacgcagggccagaccatgactctggaagagggcgcagtgctgctgtacaatgcccttaccgcaaatacggcaggcggcagtgtgtacggcaccacgctgggctacaccgtgacgaacggtcaggtggatgtttcctccatcctgctcagcagtctggagggcccctttgtggcatccgagggtgagagcctgccctttgtgccggaggccatctaccgcaatgacagtgtgagcacctcggcacagctttccgcctatgacgtatactattacaatgccagcgcaaagacggtgtggatctacacccgcaaggcagcaggccggatcacggcggtgtcgcccagcgccagcgcacccacctcggttaccgtggcaggcaccagctacaccattgcaagctcctcggcggcggcacagctgtccagcctgaacggcggcggcgtggggcaggtggtcaccctgctgctgggcatgaacaacgaggccgttgcggtgctgaccggcgatgaagcggacgaagtattctacggtgtggtgcagaccgccgcccgcagccttgtggaggaaaacggtgcggacgtccggcaggcggtggcagtcaagtgcactgacggcgttacccgcaccgtgaatgtggacaaaagcctgaattacccggcgggctggatggtaaagatcacggtgaacgccgagggcgaacaggtggagaccatcaccaaaaccagcacctccggcaccatcaatgcagacggcaccgctctgggcggcactgcccttgcagacgacgtagaaattctggatacgacatcggagggtgtggctgggacggtaagtcccagccgcctatcgggggtaacactttctgacgccgatgtgcgctactacaccaccaacgaaaacggccagatcgaccgcctgatcctgaacgatgtgaccggtgatctgtggacctatggcgtgctggatgatgtgaagaacctcatcaacaacaccacgaccaccaccagcggaacgacctcctccggcatgacagtcagcacggcgatcaaaaagctcacagggaacgacagcaccactggcacgaccggcagcagcaccaccaccacgaccacgacagatgattcccagatcatcagcgatgtggcggatatcgtgctgcccagcaccggcgatcttttgtggggccttgtggacggcagcattggcagcagcctgtgggaaagcgtgaccggcagcaccgataaactggcaagctacctgctcaaactgggcgccaacaataccagcggcagcctgagcaccgtgctcaactatctgggaagcggtgcagattacgtgtgctacgtgaacggcaaacagacgacctacaagaccagtaccaaatatccggtgctggcaggcggcatcgccattggcaccagcacctccggtacggtcaaatccatgacgcagctgctgcccgtagtcattgacaaggtgggtgcggcctcggtcatgagcggaaacaaaaagtacgaaactgccgatgagatgcaggtgtatctgtggtataaaggcacctactatcccaccactctttctcaggtgaacggtgaggagtacaccctcatcggctggtacgatggcggcctgcgcgcggcaggcggcaagatccgcgtgctgatcgcggtcaggaaaaactga

SEQ ID NO: 2559 - DNA, 1434 bp, unclassified Faecalibacterium
atgaaaaaattcaagctcacttcctccgcaaacggcaaagtgttccgcagcgggctgtattccacggccattctggcggcagcgatcgtgctggcggtactggtcaacctgctggcaggtgcgatcccgtccaagtacaccgagttcgatctctctgccgccaagatgtacactttgggcgacagctccagacagctgatgcagagccttgatcaggatgtgacggtctactacctctgcgagaccggcagcgaagacgccattgtgagcaagctgctggatcactatgccgatgagagcagccgtttccactgggaacagaaagaccccgccctctatccggcctttgcgtcccagtacggtgcagagaatgtatccaccggcagcctgatcgtggtcagcggcgagaacagcgtggtgctggacgccgctgagctctacgaatacgactactccgattactacaccaccggctctgcaaatgtgacgtttgcaggcgaaaagcagatcagttcggccatctacaagctgacctccggggcagaaagccatgccttctacaccaccaaccacggtgagcaggcccctacttcctcgctgaccgaagcgctggaagcccagaatatcgacctgcagccgctggatctgctaacaggcaccatcccagaggactgcgggctgctgatcatcaatgcgcctgcttcggattttgcctccgacggtcttgtggacgagatcgcgcagctgcaggcctatctggaaaacggcggcaaagtgctgctgatgaccagtgcctttgtcgatacgccgaatctggacgctgtaatgacacagttcggccttgcccgtgagccgggcatcgtggtggagggcgatgcaggccatgcactgtacggctacccgtattcgctgtttccggatcacgcctccgacgatgacgaaagcaccgttctggacggtgtgagccagaatacccatgtcatgctttcggtggcacagggcatcaccattgccgaaacggacggcgttacggcagaacccttgctgaacaccaccggggacgcctacagcaagctgaactataatgaggcggccaccactgccaaagaatccggcgatacggatggcccctttgcgctggccgcgtgggcacgcaatgagtctgccggttcggaggtaatctgggtgggctgccccaatgtggacagtgagcaggtataccagtccatcccgggcaacctgaccttcctgcagagctgcgccgctgcgctggtgggacagagcatgctcatcgatacaaaagcactggaagcagcccccatcacagtggcagcttccacttccatggcgctggccatggtgttcgtgttcgtgctgcctgcagcggtgctcattgcgggtgccgtgttcgtgctgctgcgccgccgcagataa

SEQ ID NO: 2560 - DNA, 2496 bp, unclassified Faecalibacterium
atgcggaaaacggacttgaacgcgatctacatttcggagcgggtgcaggagaccctgcgccctgtttcggtcagcgcactgacagcggtggtggctcccatgggctacggcaagaccacggcggtcaactggtttttgaaccagcgcaggcagacggaagcggccgtcatcctgcgggtgaatatctattccgacaatcgcttcatcttctggaaaagtgttcagaacgcctttgcggcagcagggctgacagcactggcgggctgcgaataccccgaagatgccagcagcgccgcccagttgatggatgacctgtgcgccgtgctggcaggagacactccctgctacctgtttctggatgatttccacctgttaaaggacgaaaaagcggcaaagttcctgtgcgggctggcaaaccgcctaccggcgaacatccacctgatcgtggcaagccggaacaactttctgcccaaggaagagatcctccggctggggcaccgtctgcaccgcattggcagggagcagctgcggctcaaccataccgagcttgcccactacgcccaccgctgcggtatggacctgaccgaggcacaggtggaaagccttctgcgctcctgtgaggggtggttttctgccatatacctgaatctgcactccttagccgagcggggcatcctgctgagcgaggatgccgatatctactccatgttcacggcggcgatgctggaaaacctgccgtcccaaaagcgggagttccttgcaataatggggcttgcggatgagtttacggtggaaatggcacgggtcgtgtccgaaatgccggacgcagaggagatcctgctgaccctgaccgagcagaacgcctttgtgacccgcctgccggacggaaaggccttccggtttcatcacatgctcaaggagtgtgccgtgcggctgtttgcccggctgacgccggaaaagcaggatgcctgccgggaacggtacggggcgtggtatgaggcaaagcagcagtacctccatgccctgaccgcctacgaggcgtgcaaagactacgacgcagcgctgcaggtcattgaacgggatgccgggatcctgctgtcctcccttgacccggcagagctgctggaacggctggggcgctgtccggcggaaacgctcaagcggcacccctttgccattctggtgctgatgcgctgtatgttcaactggcggcagatcccgaaaatgatggagctgaagcagcttctgctgaccacggtggcagagcatccggagtggtctcaggaagaaaaaggcagccttctgggagagtgcgacctgatcctgagctttctcatgtacaacgatatctctgccatgagccgcctgcaccgcagcgccagtgcgcagatgtcccacccggctatcagcatccagaacagcggcgggtggaccttcggttctccctcggtgctgatgatgttccaccgtcagcccggtcagctggaccgggagctggcagagatggatgaatgtatgccccactattataagatcaccaatgggcacggcatgggggcggagaccatcatgcgggcagaagcagatctgcagcaggggcggttcgacgacgcgcagatcctgttggagcgtgcctatgcacagatcgagggcaacggtcagaccaacatgaccctctgctgtgattttctggcgtggcggctgtccctctgtgggccctacacgccccgggtcccgctggaagtacggcgggaagagatgctccggcagcacaatatgtcatggcgcaatctgttcaacgccatctgcgcctattactacgccctgcgggggcagacagacagcatcccggaggtgtacgccgcccaccgcatgaataccgtgaacaccctcgctcccggcaaacccatgatcgggctgatcgaaaatcaggtgtatctggcacagggagaatgggcccgggtgctgggccgcagcccgggcctgctgaccctgtgcgaagcccttcactatgaccttgtggccctgcatctgcggattcagatggcggcagcctatgcccggctgggccgacaggacgaaggcctcagcctgctccagcaggctctggcgcaggccgccccggacggctttgtagtgccctttgcggaaaatttccgggatctgaaacctctgctggaagcagcacaggaagggccccattccgatgctgtccggcgcatccttgctctgggcgcagcgcaggaggaacgctgccgggcattgaaccacagcgaggccctgcccgaagctgccgcccggctgacagagcgggagcttacactggcaaggcttattgcagaccgctgcaccaacaaagagatcgctgccaagatgttcctttcggaaggaacggtgaagcagtacacaaaccagctttattccaagctgggcattggcggcggggtgcgcacgaagcgtgcccagctggcagagttgttcgccaaaaaatactaa

SEQ ID NO: 2561 - DNA, 2412 bp, unclassified Faecalibacterium
atggaaacaagttacttaaaaacactggaactggataagatcatcgcccgtgcagcagaaggctgtgtgtgcaaggaagcacatgagatgctgcttgcccttcagccgcagtgcgacccggacgaagtgcgctatgcgctggagcagaccgacgcgatcaataccctgctgatcaagaatggctcgcctcgttttggcggtgtagaaaatgtcagccagctggcggcacgcgcagtcaagggcggtgtgctctcaatgggtgaactgctgatggtagccggtgcgctgcgcaattttcagaatctttcaagctggtatggagcatcggagcacgatgctctgccgacagatgatctgttctatgcactggcaccgcagccaagtctggaacagcagatctccagcgccattctggcaccggatgccatggcagacacggcttcccatacgctgaatgacctgcgcaagaagatccgcgccaccgaaaacagcatccgagaccgcttggaaagcatggtgcgcaacatggacacctccaaatatctgcaggagagtgtggtatccatgcgcaacggccggtatgttgtgccggtcaagagcgaatatcgcggcgaagtgagcggcattatccacgacgtatcctccaccggagccactgtttttgtggagccgcaggccgttgtggaagcaaatgcccgcattttgcagtatcgtgcacaggaagcccaggagatcgaacgcatattggtggcgttcactgcacaggtggccgccatcgaaccgcagttccagtacagctataaggccatgctggaaattgacattctgctggcaaaagcgcgtctggcgctggatctcaaagcctttaagcctgctgtgcgtacagacaattctttctctctgatccgtgcgcggcatccgctgatcgaccctaaaaagtgcgtgccggtagatattgcattgggcagggaatacgattcgcttattatcaccggcccgaacaccggcggcaagaccgtcaccttgaaaaccgccggtctgctgtgcgctatggcgcagtgcggctttttgatcccggctgatgagcgcagcgagatctgcgtatttgacgaatttctggtagacatcggcgacgagcagagcattgagcagagcctttccaccttctccggccacatgaaaaagatcaccggaattctggagcttgccatgccgcatacgctggtgctgctggacgagttgggtgccggcaccgaccccgctgagggcgctgcattggctgttgccattattgaggaactgcgccgccgcggcgttctgctgatggccaccacccattacgcagagctcaaggtgtttgcactggagaccaaaggcgtggtcaatgccagctgtgagttcgatctggaaacactgcgccccacctacaaactgagtgtcggcgtaccgggcaaatccaatgcattcctcatcagtgaaaaacttggcatcccggagcgtgtcattgaagcggcgcagcagcacctgtccgcagaggataagcggctggatgctgttctggggcagctggacgatttgaaattacagctgaaggaaagccagaacgaggtggaagagctgaaaaatgaggcctctcatcagctggaagccgcccagaaaaaacgcgatgagctgatccagcaaggcgaaaatgagctggaagccgcccgtgccaaggcccgcgcactggctcagcaggtggaaagtcaggcctacgctctgaccgatgagctgcgccagctgcagaaagatgaacgcatgagcacccagcagaaggcacagcgcgcacgtgagattgcaaagaaagaatccgaaaaactctttatcggcacagaagtggtgcacaatcccgtcaaggagtttgtgccgctgaaagaggtcaaagtagggcaggaggtctgcattgcagagctgaaccagctggccaccgtgctggctctgccagataaaaacggtgatgtgctggtgcgtgccggtatcatcaagactaaggtcccgctcaagggattgaagcagccggaaaaactggtcaaggaaaagaaaccgcagaccaaggcgcagcagcgctactcccgtctgaccggtgatgccaaccgtccaaacggcagggtagagcgcgtgcagcgttctgctaaaatggaatgcaatctgctcggtctgaccgtggacgaagcgttgccggaggtggattcctttattgaccgtgcgattctgaacgggcagacggtggtctacctgatccacggcaatggaaccggtgcgttgcgcacagccattcataagcatctgcgcggaaaccgcatggtcaaaagttttcgtctgggccgctacggcgaaggtgaaagcggcgtgaccgtggtagaactgaaataa

SEQ ID NO: 2562 - DNA, 1350 bp, unclassified Faecalibacterium
atgaaagagcatcacggccttgcaaaacagtttatacgcatcattgcactggcggcgctggaaagcgtgctgctgctgacagtatcgcaggtggtgcttgccaaggggctgcgcttctggttcagccgcacggaggtacagcagcacgccacccagaaacaggtgcaggagctgcaaagctatgtgaccgaacatcaccttgccagtaccgatgtaaaggaattgacagactggagccataagcggcgctataccctgctggaactctaccggggccagacgatgatctactcttcgtttgcacccaaagacgggatgatctcgtttctgccgcagaacggcacatcggatcagaacccgggtgttctggtggataagaccggcgtttacgattggctgccctgctacacgctcacctttgcagacggcgaggtgagcgcgatgctctattacaacggctttaatacctattacggcaccgggtgcgagatcttgctttccctgtgcatcttatggtggttcccgagcctcttcctgctgcactgccgcaggatcgtgcgctacgtcgtgcagctcagcgaggagatccaggccatggagggcggcgatctggatcaccccattaccatccgcggcagcgatgagatcaccacgctggcgtcctgtctggactccatgcgggtgaccttgcgccagcagcaggaagaggaggcgcaggcatcggccaaggtgaagaacctcatcaccgaaatgtctcacgacctgcgcacgccgctgaccaccctgctgctgtataccgagatcctgcgctgccgcaagtacgaaacgccggaacaggccgacaattacctgaacaagatcgacgcgaaggcccggcagatcaagcagctttcggataatctgttcgagtatgcgctggtcacccgggataccgtggccgtgctggacccgcccgcacatttttcagctgtgtttgaagagccgctcacggaaatggtggaaacgctgcagcagcgcggctttgcctgcgcgctggaactgggcgaggaagacgtgctgctctcggtcagcgggcagtatgtgcgccgcattctggataacatcacctccaatctgctcaagtatgcagatccggacagggatgttgtcgtgcgcttcgtgcaggagggaagcagagcggggctttgttttgagaactgcgtgctgccggtgcctgcttcctcagagagcaccaaggtgggcctgcccagcatcgaaaccatgatggaaaaaatgcagggtgtctgccgcattgagcagccggagggcgttttccgcatgacgctgctgttcaaaacagcaaaagagtaa

SEQ ID NO: 2563 - DNA, 2715 bp, unclassified Faecalibacterium
atgccgaaggataaaaataacaatcaggcaatgaccgaggatgaaaagttccgctcttttttcagcaccacggcggtgaacatcccggatgaaatgacccggcgggatgaagaactgccggaggaaaagccgcagaagcggtttggcctgtttgcccgcggcaaggcagatcaggaggaagcccaggcagcagagccgcaggaaatgcccaccggtgaggtggtgctgggcggggatgcccagccggagcaggaagcagatctggaactgatgctgaagcctgcggcagacccggagcgggagctggccccgtggccccttctggagacggaagcggaggatgcagaaccgctcagggtggatcttccggcccctgctcctgcaaaggagccggagccgcccagacagagcacagccccggtggcagagcctgccgggcagcgcagtgaggcaaaaacctctcgcaatcccaagaatgcaccggaggtgcttctgccgcaggaggaacaggagcagcaggaaatggctcagctcaaggccatgatcaatggcctgagcgagaaaaagcccgctcccggcgcagccgcgccgacccggacggcacaggcagagtcagaggaaacagccccggcagcgcagccggaaactgctcctgaacgtaaaaaagaagaaagcggcacgccgctgcccgctgctgtgtttgcgtcggtgaaggaagcggatgccgacctgcagccgaaggaaaaaaagagaccggaacgcaaaaagtcggtgatcgatttctttggccatgcagaggacgaagaaaagccgcaggccccctcggccccggcagatgcgcccgctgcaaaagaggacaccatgagcctgccgctgctgccgctggacggcgaagccccggcggcagagccgcagacaaaggcagaggcagcgcctcagccggaacaaaagccggaagctggggagcctgcgccgctggctgaggagccggagagcgagctgcagggcccggaggcgacagcggaaaagctgcaccgcatgagcgccgagctgacgctgcgctgcgtactgggcggcattctggccgtggtgctgctgcactttggtctggtgtcggacgggctgctgcccgcgatggccgcgctggacccggatgcagctccggcggcattctacggcgcaaacctgctgctgctggcggcaagcctgtgcgtgggcttcccggtcctgcgggacggcctgaccggcctgcgcgggcgtccctcggccgatacgatgccggctctggctgcagcggcggcgctgctgcaggccgtgacggcaatgctgaacgccaatgtctaccgcggcaccacgggcatttctctgctcagcggcatggcggcgctgggcctgttccttgccctgctgggcagccgggtgatgctggcagcggtcaagggcgggtatgagctggtgaccaatggcgtggagcatcagggcgctttccgcgccagagataaggacctgctgcgtgcgctggcacgggatctggaacagaaggatccatgggtgctgttgagccgcccgatgcaggatgccgaaggctttgtggaacagagcctgtgcgagcgtgccagcgagcgccgtgcccgcaaggtctcgtacattctgctgggcgttgccctgctcagcggtgtgctgttcctgctggcaggagccgggtggaacaaggccgttgcagccatggtcgcagtgctgtgcatgggtgcaccgctgtcttccaccctcatcgcgggcattgcatcgctgcggctgcagcgcgccgctgcggctgtgggtgcggtggtgcccggctggcaggccattgagcagctgggcggtatcgatacgctgcagatcgacgccgacgacctgtttaccaccgacagcgcacagctggaggacatccgcatcttcaagggcggccgcatcgaccgtgcgatcctgtacgcggccagcgtgctcaacgagacccacggtgccctgcggggcctgttccgccagatcatcgaggaccgtaccgacatcctgttcccggtcaaggatctggaacagcatcggggactgggcttctcgggctggtgcgataataaccgcatcctcatcggcacccgccgctatctggagaaggagggcgtctcgctgccggatgaagagtacgaggcgcagcactccaaaaacggggaactgcagatcctgtatctggcagtctccggcaatctgcacgcaatgttcgtgctgaagtatgtgggcgggcgcaatgtggcccggggccttgccgtgttgcagaaggaaaatatccggctgatggtcacctgtcaggaccccagcctgaccgcaaagcatatcaccgaggtgtaccgcctgccggagggcatggtcacggtgctggatcaggagcagtgcgatgccatcaaggccgcacctgccgacccggcggacgtctgctgcatgatccatctcaagggctttgccagcctgaccggcggcctgcaggcggcagatcaggcccagaatgctgagaacagtgccaccacggtgcagatggtctcggtgctgttctccattgtcattgcggctctgctgaccagcgcgggcagcatctgggagctgtcggtggcgacggtgctgatgtatcaggccgcatggagtgcactgagcattgcagtctgcgccctgaagcagcacagttga

SEQ ID NO: 2564 - DNA, 2301 bp, unclassified Faecalibacterium
atgagcatctgggaaaaaatgggctttggcggttacaagggcttttcgcatgaggcggacagactgctgcgcagtgcagtggagcttgccgggaacctgggctgcgaaaaggcagataccagccatctgctgctggcgatcctgcagcaggatcagggcgcagcagcgcggtttctggcaggcaaacagatctgtgagccggaagtgcgccgtcaactggctcagacccgccgcgccccggctctgcatctggaccgccatgaccttgcaccggatctcaagcgtaccatggactatgccatcatcggggcgcagaacgctcacctgaaccgtgccgagccggagcatctgctctgcgcgatgctggaggatgatggctgcacggcaggcgtgctgctggcgtccatggggctgcagctcacagaggctgtgagagaatgccgccagttgtccgggcagttcgttctgccgtaccagacacgggcggtagccggtgcaccacgcggcagccgggccagtgataaatactgccgtgacctgacccgccgcgccgcagaacgggagctggacccggtgttctgccgggaggcggagctggaccgcatggtagagatcttatgccgccgtcagaaaaacaacccctgtctggtgggggagccgggcgttggcaagacggcgttggcagagggtcttgcccagcgcattgccggggaccgcgtgccgcgcgcgctcaaggggcgccgtcttctggcactggatatggccagccttgtggcaggcacaaaataccgcggtgattttgaggagcgattcaaaaacctgttggaagaactggtccgggacggcagcgccatcctgttcgtggacgaattccataccattgtaggtgccggtgcagcggaaggtgccattgatgcagccagcattttaaagccggtgctggcacgcggagagctgcagatgatcggtgccactaccaccgaggaattccgcacccatatccagaaggatgctgcattggaacgccgtttcggcaaggtgcaggtggaggagcctacgcctgcacaggccgtcgatatcctcagcggtctggccccgcgctacgaacgctatcacaacgtaaagcttccgcaggagaccctgcaggcggcagtggaactctcggtacggtatctgccggggcgttttctgccggataaggccatcgaccttgtggatgaagcctgcgcagcggcacgcatccgtgcggaacgggaaaagcagccccagcccgtgctgaccccggatgatatcgcccatgtggtggcacaggccagcggcgtgcccacagagcgcgttggagagcaggaacgggaacggctggaaaagctggaacagcgcctgaacgaggaaatcgtcgggcagagccgcgcagtcgctgccgtggcaggggccatccgccgcagccggaccgggcttggggagccgggaaggcccataggagccatgctgttccttggccccaccggcgttggcaaaacggcccttgccagggcgctggcggtcagctggttcggcagcgaaaaggcactgctcaagtttgacatgtcggaatatcaggagcagcacaccgctgcccggctgctgggtgccccgccgggctatctgggccatgatgagggcgggcagcttaccgaggccgtgcgccgccgcccctacagcgtggtcctgtttgatgagatcgaaaaagcccacccggatatccagaacatcctgctgcagatcctggaggatgggcagctcaccgatgccatggggcgaaaagcggatttccgcaacaccatcgtgctgctcacatccaaccttggcgcgcgctttctggcgggtcagagcgctccgctgggctttgctgcgggcagtgaagccgtatttgaaaagcagtcggcgcaggccgttgaggaagcgaaaaagtggttccggccagaactggcaggccgtctggatgaaatgatcgtgttccgtccgctggcagatgacagcctgtgcgccattgcggaaaaactgctctgccagctggaacagcgtgcagcaggcagtggctatcagctgcaccatacgcctcaggtgggcagggcactggcggcaaaggcacggtcagcctatggcgcccgggaactgcgccgcgccgtggacagggcagtagagcaagcccttgcagaccgcattgcctccggcacagccagtaccggccagcactggacagcggactgctcggctgatggctctatcatcctgcgggaggatgaaaccgtaaccatgtaa

SEQ ID NO: 2565 - DNA, 3036 bp, unclassified Faecalibacterium
atgatgctgcacaggcgggcagcgcagggcacacagacgccccggcgcggagaaaagacacaaccgatcttccgcaccattttcggggcgatgatgctggtactggtggcagaggtcctgctgctcgtcatcagcatctacgtcaccaatgtgggcggcaggctgaaccagaacgcaaaggacatgcttgccatgcaggtgcgcaaccgcgtcggttacatgcaggacctgatgcagaatgcacaggacctgaccgatctttcggactacatcgaccgggccaccctttccatggtgaacacgggccgtctggatctggatgccctgaacaccgacagtgaacagagcagcgcgctgcttgccgccattgcaccggaactggtcaacaccctgcgcgcacggtccgtcaccggtatttttgtggtgctgaacaccgaggacctgcgcattctggatgtgggcagcggtgtgcccggcatctatctgcgggatctggacccggacgcccgcccctcggaggataatgccgatctgctgatcgagcgcggcagcgcggcagtggtcaaggcgctgggcatcaccaccgataaaagctggcagcctgccctgcgctactatggcctgaagggccggggctttttcaaggagccgttcctgcgggcctatgaggacaatgcccgcctgagcgaggaatattacggccgctggaccaccagcgcatacacgatctcgggcgatgaccgctcggccattgcctactcccagccgctgatcctgccggacggcacggtgtacggcgtggtgggcgtggagttgctcaccagctatgtgcaggaaaaaatgccctatgcagagctgcagaacgagaaaagcggcgcgtattttctggtgtccaccactgcggacgaggacgccgaggaattcgtggtcagcaagttggtcacgtccagtcaggacagcgatgcactggaagcaccggaaagcatgatgcgctgcgagaggcgggcagacggctgctggctgaacctgcacaaacgggattactacgcggtggcaatgcccatcagcctgtacagccgcaacgcgcccttctccgatgagcactggctgctgatcggcgcggtgaacagccagacgctgtttgcctttgcgcagaatgtccggcatgtgctcaccgctgtggtggtgggcacgctggtgctgggcatgctgagcagcctgctgatcgcccgcaagctggcccgcccggtggagatgctgtattacgaggtggtggacgggcaggagaaaaagaagttcccggagctgtcccatacaaagatccgggagctggaccgtctggccgatgcactgaccagcctgaacagcgagctgctgaacaactccacaaagtttctgcgcatcatggatatggccagtgtggagctgggcggctatgagctgcggttcgacaccggcagcgtgtatgttaccgataactttttttccctgctgggcgaaccccagcctgcggaccgcttcctgagcgtgcgtcactttgaggaaacgctgacccggatccagctttcccgcccctgcaccaccacggaaaggggagacaagctgctgaccatccgcaaggacggccggacccgctacgttctgctgcgcgtcaccaaagactggaacgtgcaggtgggtctggccgaggatgtcaccatcgccacgctggagcgcctgcgcatcgagcacgaacgggactacgatatcctcaccggcctgtacaaccgtcaggccttccagcgggtgtgcggggagctgtttgaggacccgcagcagctgggcaccgcagctctgctgatgatggatctggacaacctcaagcacatcaacgacacctacggccacgactggggcgaccagtacatccaccgcaccggcctttgtctggcagagaacacccccgccggcacggtggtggcccgcctgtccggcgatgagttcatgctgctgttctacggttatctgaaccgggaacagatccgggaaaaggtgcacgtcctgagcgacgccatgcacaagagcgtggcggtgctgcccggcggcagcgaactgcgcatcagcatctcgggcggcatggcatggtacccggaggacagccgggacatggagaccctgaaaaaatatgccgactttgcgctgtatcaggtcaagcactcccacaagggctgcctgcaggagttcagcatggaaagctaccgcagggaagcccagaccgcacagctgcggcgggacttccagcagctgcttaccgaggaacgggtgtactatatgttccagcccatcttctcggcctacgatggccgggtgatggcctacgaagccctgatgcgctccgatatggagagactgcgttcgcctgccaccatcatgaagctggcgcgggagcagggagcactgcaggagatcgaacggctgaccttcttcaagtcgctggagacctttgaccacctgcgcagcgagggtcttgtgcgcagggacgcgctgctgttcatcaactccattgcaagcattgccctgccgcaggaggactgcgagtatatggacagccgctggcatgagctgctccgccaggtggtgatcgaaatcaccgaggaagaggcgatcgaccgggaagcaatggaggcaaagcgccgtgcgccgagctcttccggcatgttcgcgctggatgattatggcagcggctactccaacgagggcagcctgctggagctttcgccccggttcatcaaggtggatctcaccatcatccgcggcatcgacaccgaccccgacaaacagcagatcgtgcagaacatcgtggcctatgcccacccgcgcagcatgcagatcattgccgagggcgtggagacggccggggagctgaaaaaggtgctggagctgggcgtggacggcctgcagggctatttccttgcaaagcccgccaacatcccgacccggatcgcgcccgctgcccggcagatcatcgaaaacagccatagctcggactgcggctga

SEQ ID NO: 2566 - DNA, 1572 bp, unclassified Faecalibacterium
ttgaaacagttcctgcgtatcaccgcagcggtgcttgccgctgcgttcctgtttgcccttaccggctgcagcggcggctccggtgcagccagctttacatggtttgtggataccatccccgcaaatcttgacccacaggtcgtgtctgccgcgccagacgtcattgcctgcgagaatctttacggcggccttgtgcgcaaaaacgccgatggcgagatcgtacctaacctgtgcgaaagctggaccgtctccccggatggccgcacctacacctttgccataaaagacggcctgacctacaccgctgctaagggaaccgccacagattattccatcaccgccgaggactttgtgtttgcgttccggcgcatctttcaggcacagacgggttctccctatgcggtagagttttctgcgattgaaaacagcgccgctgttctggacggcacagcggcgctcagtacgctgggggtttcggcttccggtccgctgacgctggtgttccgcctgagtgaaaaggacgacaacttcctcgcaaagctcaccctgcccggtgccatgccctgcgacgaggagtttttcaacagcacccgcggcacctacggcctgacggcaaagaccaccctttccagcggcagtttctatctgtacaactggaccgccagcggcctgttcctgcggcgcgatgtctctgcgcccctgatcggcagcctgcgtctggtgcagaacaccggcagcaccggcaagagtgccgctcagctcatcgcggacgagaaatgctctgccgcgctggacgacaccggcgaagcgaccgcgctgcgggctgtttcctactccgataccacctgggccctgctgttcaacagcgccgagggctctgtctttgagaatcaggcactgcggcaggcactggccggcattgcccgggaaaatgcagcagtgccttcttccggcctgtacaccgccgccgagggccttgtgcctgcagggctgactgtagatggcatcacctaccgcgacactgccggggatcccacgcctgtgatcccggacccacgcgcactgtatctggaagcacggcagggcatggccagctctgatttttccggtgtgaccatcctgctgcccaaggaagccgggctcaccgaactggccgagcagatcaacggtgcatggcagaaggactgttccctcttcttctcagtggaggaggttccgcaggaagagtttggcaagcgccttgcggcgggcgattacaccatcgcactggctcccatctgtgccgagggcggcagcgtataccagatgcttcagcagttcactgccgagagcggtggtttgaccggttactctgacccgctgtacaccgaacgtctggcagaaagtgcacagcagaccggccgcgcccgttgcgccctgctggccgaatgcgaacgtcagctgctggaaggctgcaccgtggtgccgctgctgggccagcaaaaacgtctgctggtggcagacggcatcaaaggactggtgtttgacccgttcactccggtactggatctgacctatactacaaaaaactga

SEQ ID NO: 2567 - DNA, 891 bp, unclassified Faecalibacterium
atgagaaacgtaacggtggccgtggtgcagatgcagtgcgccaaagaggtggaggccaacatcgccaaggcagatgccatggtgcgggaggcggcggcaaagggggccaagatcatcctgctgccggaactgttcgagcggccctatttctgtcaggaacggcagtatgaatattacgcctacgccacccccacggcacagaatccggcagtgcagcacttccgggcagtggcaaaggagctgggcgtagtgctgcccatcagcttctatgagaaggcgggcacccagctgttcaacagcatcgcagtgctggatgcagacggcaccctgctgggcgtctaccgcaagacccacatcccggacgaccactactatcaggaaaaattctactttacccccggcgacaccggcttcaaggtgtgggatacccgctttggccgcatcggcatcggcatctgctgggatcagtggttcccggagacggcccgcagtctggccctgatgggggctgagctgctgctgtaccccacggccattggcagcgaacccattctggactgcgacagcgccgggcactggcgccgctgcatgcagggccatgccggcagcaaccttgtgccggttctggcggcaaaccgcatcggtctggaaacggtggagccctgtgaggccaacggcgggcaaaagtctgccctgcggttctacggctcctccttcattgcagacgagaccggtgcactggtggcagacggcacccgcgataccgaacaggtgctgaccgcgaccttcgatctggacaaggtggaagaaaaccgcatgagctggggcgtgttccgggaccgccgcccggagtggtacggcgagatcacccgtcagggccggggcgtttga

SEQ ID NO: 2568 - DNA, 1080 bp, unclassified Faecalibacterium
caattgccgcgggcgcagcaattgggatcggctgtgccgaagcagagaggggggaatgctgaaaaaaggaggggatcctgtatgaatgtacgacagcgcacggaagagatcgaacgtatgacctttgcaccgtgggcgactttcagcgaccagagcagggggaggatggtgcaggaggaacaggacccgatcaggccggtgttccagcgcgaccgtgaccgggtgctgcactgcaaggccttccgccgcctcaagcagaaaacgcaggtatttctctcgccggaaggagatctgtaccggacccggctgacccatacgctggaagtttcacagatcgcccgtaccattgcccgggccctgcggctcaacgaggatctgactgaggccatcagtctggcccatgatctggggcatacgccctttggccatgcgggtgaacaggcgttgaacgagctctgcccggatggtttcaagcactatatgcagagcctgcgtgtagtggacaggctggaaaaggacggaaagggcctgaacctgacatgggaggtgcgcaacggcatcgtgacccacaccaagggaacatgggcggcaacgccggagggacgcatcgtgcgcatggccgaccagatcgcttttgtgaaccatgatatcgaggatgccgttcgtgccggggtgctggacccggacattctgcccaaagagtgcacggctgtgctgggcaggaccaaatctgcccgcatcaccacaatgatcaacagcgttctggccaacagcgaaggcgatgtgaaggtaggcgcagaggaaaacgaggctttccttgcgttgcgcgacttcatgtacgctacggtgtatgtggaccggagcgccaagcgggaggagcagaaggtgggcaaggtgatcgaagagctgtatgagtactacctgagccacatcgatcaaatgtccaacttttatgtccagctggcctatcaggagggcagagagcgtgccgtcaccgactacatcagcggcatgagcgatgaatttgccatccggacctttgaggaaatttttgtgccgcagaaatggcatgtgttgtaa

SEQ ID NO: 2569 - DNA, 1260 bp, unclassified Faecalibacterium
gtggatccctattactatagcacatttcagccggtgtttggtgcaccggctgaatttttttgcaaaatgcgcccggatgcaggggtgcgggcggcaagtctattgtatctgctgggaaaatccggtatactaaacaaaaaacaacaggagaatgcaatgcaaactttttctaccctgcccgccgccgagggcttccggatgccggcggaatatgagccgcaccgcggctgtgtgatgatctggccggtgcggcccggttcctgggtgtacggcggccgggacgcccagcctgcctttgcgcaggccgcccgcgccattgccgagagcgagacggtgtggatgctggccggcccggcggatgccggtgccgtgcaggcggagtttgccggggacgagaacatccatgtgctgaccatcgagaccgatgacgcatgggcgcgggatgtgggccccacctgcgtggtggacgatcacggcactgtgcggggcgtggactggcagttcaacgcatggggcggcatggtggacggcctttacgcccactgggaaaaggacaacgcagccgcccgcgccatctgcgcagcactgggcatggactgctatgatgcacagcactttgtgctggagggcggctccatccactcggacggtgaaggcaccatccttgccaccgaagtctgtctgctgagccgtggccgcaacccggagctgagccgggccgagatcgagcaggagctgaaaaactatctcggcgcacagaagatcgtctggctgccccggggcatctacaacgatgagaccaacgagcatgtggacaacgtgtgcgcctatgtgggcccggcagaggtggtgctggcgtggacggaggacgagaacgacccgcagtacgccctgagcagggcaagtctggatgcgctggaagcagccaccgatgcaaagggccggcacttcacggtgcacaagctgcccatcccggcaaagcccatctgcgtgaccgaagaggaactgcagggctatgcctttgaagagggcgaggatacccgtgaggccggggagcgccttgcagcaagctatgtgaacttttacatctccaacggcggcatcatcctgccgcagttcggggacgagaacgacgccgaggcggtacgcattctgggcggactgttcccgggccgcagggtgtaccccatcccggcccggagcattctggtgggcggcggcaacatccactgcgtcacccagcagatccccagaggctga

SEQ ID NO: 2570 - DNA, 1329 bp, unclassified Faecalibacterium
gtgatcgatatgccggacgagacccggaaggagggtcgtgcatcccatggatttgccacgctggcaggggtgctgatcgcatttctgctgctggctgcagggtatgtgctctatcaggccatgcacgtcctgttcccgcagaatgtctatgaaacggcactgcctgcggtcatttcggataccgtggattcagacggcgtgctgctgtttgacgaaagctatgtggcaggcagcggaaaccttggatatcttgcggcggacggtgagcgcgtttccgcaggcactgcggtggcagagatctacagcaatgcatcgcaggccacgctgcgccagcagctgacccagttgaatgaccagatcgatctgctgcagagatcccagaacacggcagccctgcagctggacagccttttaaaagaacgtgctggcgcactgtatgatctgctggatacactggatgacggcgactacgaggcagtggatgatgactccaatgcctatcagcttgcacagaacaagctctgggtcgtcaccggtgatgctgcaaactttaccgatcagatcacggctctggtccagcaggcccagagcgtgcaggcccaactgggcagtcctacccagatcgctgcgccgcagaccggttactttgtacgggcttccggcagcggcaggctcaatgccggcgcggacgacatccttgcactgagtgcgcaggagctgcagggctatctggattccgacccggtgatcgcactggatggctgtgccggtaagatcgtagccggttttacatggcgctatgtgggcgtgtgcagcgcaaagcagggagaaaagctgctgggtcaggacggcaagccgctgcgctctgcggtggagatcagctttccgggacggatggaaaacggcctgaaggcgaccgttgccgaagtgagcattgatgcggacagcggccttgcacgctttgtgctcacctgcaactccatcaacggggatgtgctgtgcctgaaccgggctgccgcacggatctcggtaggggagcacagcggcctgcgggtgcctgcagcagcggtgcactatctgaaggaggacgggaccgaggccgagaccgagacacagggcgagaactatgttcccggcgtttacgtcaagcttggcaacatcgcgcgcttctgccggatcgacccggtggatgtagaccatccgctgatcacagacggcgattacatccttgttttgcccgaagggactgagggttcggtcagcaaggtgaggctttatgacgaaataatcgtctccggacaaaatttgtatgacggaaagcttttgtag

SEQ ID NO: 2571 - DNA, 2097 bp, unclassified Faecalibacterium
aaaatgtggtatactaacaaaaatgaagcctgtgctgcagcatcgtccagccaacaagtctggaatgcagcgcaggaaaagtccgagagcgggagagtggattttttggagttggaacaggcaaagcagcgcgtggaagagctgcgaacgatcattgaaaaaaataatcgtctttattatgatcaggatgcgccggaactggaagattttgagtatgatgccctgacccgggagctgaaagcgctggaagcacagtttccacagctggtaacggcgtcgtctcccacgcagaaggtgggcggtaccgccagcagcaaactgcccaaggtgacccacacggtcaaaatggagagccttctggatgctttttcgtatgatgaactgcgcgactttgaccgccgtgtgcgcgaagcaggcgcagagccggagtatgtggtcgagatcaagatcgatggcctttcctgcagcttggaatatgagaatggtgagctggttcgtgcctccacccgcggcgatggcgtagtaggcgaagacgttacagccaatgtccgtgccattcgcagcattcccaaaaaattgaagaatgcaccagagtttctagaagtgcgcggtgaagtgtatatgccgcacggagcgttccagaagctctgcgcagagcaggagctgcagggcgctgcgcctttcaaaaatccgcgcaatgctgctgccggttccctgcgtcagaaggacgccaaaataaccggcagccgggggctttctatttttatttttaatgtgcagcagatccgcggcaaaaccctcacaaagcattcggaaagtctggactatctcaagagtctggggttgccggtgtcgccgcgttatcatgtggtgcatgatattgagcaggccattgcagagatcgagcagatcgggcagaaccgtgcaaagctggactttgatatggatggtgctgttataaaagtgaacagttttgcacagcgtgatttgatgggctccaccaacaaattcccgcgctgggcaatcgctttcaagtatccgccggaggtcaaagaaactacgctgcgcagcattgaggtcgcagtgggccgcaccggtgtgctgacgccgactgcctgctttgaccctgtatttctggcaggcaccacggttgcccgcgcaacgctgcacaatgaagattttatccatcagtttggtctttgcatcggcgataccattcaggtgcgcaaggctggcgatatcatcccggaagtgatcggtgtcacccgccatgcagaggatgcgcagccctacgaaatgccaaccgtctgtccttcctgcggcgcaccggtcgttcatctggaagatgaagcggctctgcgctgtgtgaaccccgaatgtccggcacaggctctgcgcaatatcatccactttgcatcccgggatgctatggatattgagggccttggcacggctgttgccactcagctggtggaaaaggatatggtgcattctgctgcggatatctacaccctgacccgggaacagcttttgacgctggacaaattcaaggagaaaagcgcagaaaatcttttgagcgcgatcgaacgctccaagcagaataatctggataagcttttgttcggttttggcatccgcaacatcggtgacaaggcagcagctctgctggcggagcattttggaacattgcaggccctccgggaagccaccgtggagaagatcagcgagatcgacggatttggtggcgtgatggcacaaagcgtagtagaattttttgcaaaagaaggcaccaccgatcttgtgcaccgcttggcagatgccggcttgaacatgcagtggaagggcgagccgaaaggcgataagctggcaggcaaaacgctggtggtcacgggtacgctggaatcgctttcccgcaacgaagccgaggctctgatcgtgaaaaatggcggcaaggccagcggctccgtctccaaaaagacggcttacgttgtggctggtgctgcggcgggttccaagctgacgaaggcacagacactcgggatccccgttctgaccgaggcagaatttctggcaatgcttcgggatgaaaatacctga

SEQ ID NO: 2572 - DNA, 2121 bp, unclassified Faecalibacterium
atggcaatgcgcgataaaattgagcacgcgatccagaatcagccgtgcacagttaaagacctcaaggcaaagttcggcggggaccgcagtgcggaccgcaaggtgatggaggctgtggaccagctggtgcacgaggcagtcatctgccagcgtcagggcgtgttctttacggtgcgttctggccgtgcagacaaggctctgctgtgcaaggtggtcaaactgggcaaaaattttgcctttgtaatgctggagggcggcaccagcgatatctttatcccgggccgctttacccgcggtgcaatgcccggtgacatggtgcttgtggaaaagtttgagcatccccgtgtggagggcagcgatgaaggcgagatccttgccattctggaagagaaaaattctctggtgggcacggtccgccgtatcgaaggccgtttgaaattcgtgccggatgactgcccggccatctccatgcagctgatgcgtgactgcgagggcggcgcaaaggacggcgacaaggtggccgtggagatcctgcagcgcggcaaccgtcaggaagatcaccgtgtgggcgttgccatgcggttcggcaattcggatgaagccaagcgctgcgccaaggccctgctctatgcgcaggatatccgcagccgcttcccggataaagtccgcgatgaagccaagaagctggagaatgccgaggtctctgaaaaggacaccgagggccgcatggatctgcgtgcactgcccatcttcaccattgacagtgccgagaccaaggacattgacgatgccatcagcctgaccaagaccccggaaggcggctttgagctgggtgtccacatcgcggatgtttccaactatgtcaagcccggcaccgagctggataacgaggcattcaaccgtgctaccagcgtctactatgccgatcaggtcgttcccatgctgcccaagcagctctccaacggcatctgcagcctgaacgagggtgcgctgcgtctggcgttctcctgcctgatgcgtctggacaaggatggcaacctgaccgactatcgctttgcgaaaacggtcatccgcagccgcgtcaagggtgtttactccgagatcaatgctctgcttgccggcagcgcagacgacgagctgaagggcaagtaccacgaggtgctcagccagctgcctgctatgaaggagctgtatggccaccgtgcccgcctgcgcaaggagcgcggctgcatggacattgagagcggcgaggtaaagctgatcctggacgaggatggccactgcattgacgtcaagaagcgcacttccggcgagagcgaagccatgatcgaggagttcatgctgctggccaaccagtgcgccgcccactttgcccgcgtgaagcagatcccctttgtgtaccgtgtgcatgaggagcccaatgccgaaaagctggaacgcctgcacaccctgctgcaggcctgcggcatcaacgaccactttgccaaggatgtgcccacccctaaggaactgagcgcgatcctggaaggtgtgcgcggcggcccgtatgagcagatcatcaataccggaatgctgcgctgcatgtccaaggctgtgtatgaggaaaagcccaaaggccactacggtctggtcctgcaggactacgcacactttaccagccccatccgccgctatccggatctggccatccatcgcatcatgacggctcagctcaagggcatcgataaggagaccatggtgctgcgctacagcgactttgccgaaaaagcaagcaagcagtccagcgaacgcgagatcatcgccatgcagatcgagcgcaaggcagaggattgctataaggccgaatacgcccgccgccatctgggcgagtgctacgaaggccgcatttccggcgtgacccagcgcggcctgttcatcgaactggaaaacggcgtggagggctttgtgcccgcttccagcctgaccccttccggcaccatgctcaccgagggcatccgcctgtccgacccggtctccggcaaaaactggagccttggcgacaccatgatgatcaccatcgtgcgcgcagacgtcaatctgggtaagatcgattttgaagttgctccggcaaacgcaaagtaa

SEQ ID NO: 2573 - DNA, 2160 bp, unclassified Faecalibacterium
atggcagtgatccatgttctggataagcacaccgccgagctgattgccgctggcgaggtggtcgagcggcctgcgtcagtggtcaaggagctgctggaaaactccatcgatgccggagctgcgcaggtgacggtcagcattgaatccggcggcgttaagctgatcgagatcagcgataacggcactggcattgaggcagaatacatttccacggcgtttatccgccatgccaccagcaagatcgaaaagccggatgacctgaacagcattcacacgctgggcttccgcggcgaagcactggcatccattgccagcgtggcgcgggtggagctgaccacccgcaccgaggcagacgagtttgccaccgtctaccgcatcgagggcggggaagagatctcccgggagccgggtgcccgtgcggtgggcactaccatccgggtgagggacctgttctacaacacccccgcccgcatgaagttcctcaaaaaggactcttccgagggcacctttgtggcggatacgatcgcccatgtggccctcagccacccggaagtcagtgtcaaattcatccgggagggcaagctgcagtatgtcacccccggcgacggtcagctgcgcagcgcggcctatgcagttctgggccgggagttcagccgggacctcattgagctgaaaaatcaggagggtgtgtaccgcatcaccggcctgatcaccccgcccaaaagctgccgcgccagccggagcatgcagcatttttacatcaatggccgctatgtgcgcaaccgcaccatgatggctggcatggagatggcctttaagggcaccatgatgcagggcaagttcccgggcggcatccttctgctggaaatgccggcagaccttgtggatgtcaacgtccatccggcaaaggtggaagtgcgttttgcccgggaaaatgatatttttgatgtggtctaccacgctgtcaagctggcactggctcagcccggcaccggcgaacggcttttcacctttgatgcagatgaaaaggtcgaaaatgaaaaaacaatcgataaaaagattgaaaacgatgtaaagaaaaacaactttacaggactttctgccatcattcccgggcaggcagacccgggcaccctgccgcagcagcgccgggaaccggcaaaaacggaggaacggcccgctctgcggccggagccggtaggaaaagccgcgccgaccgctgtgccccgctggcagagcggcacgcagaatgctcccatgctggaccccttcgtgacgctgcacagtccggaagcggaacccccccggacggcagaacccttccgtgctgcagccagcgaggcacagctggacgtagagccggaactggccggacaagagaatgcaaaaatccatgcggcacaggatcacatggcggcatgggatgcagcgcctgcggtacaggaaaacaagtcggtgccttccgcgccggagatcccggatggaccgacagagaaaaagtgtgccgctgctgcatgtccggcagaagaactgccagcagaagcagcagagccggagcagctgaactttgacccgacagccggtcagccggagcctctgcactatgtgggtgaggtgttcaagacctacattcttgcagagcgcggagacgagctgtgcctgatcgataagcatgctgcccatgaacgccagctctatgagaagctggcggccagctatggcaatgtgcccggtcagctgctgctggagcctgctgccatcgatctgtcggcagaggaaaagcaggcgctgctggacaacattccgctgctggaaaatgcaggactggaaattgcagattttggcgggaacacggtcgtgctgcgggcagtgcctgcagatgtggagccgcagaatgcggaaagcctgctggtagagatcgcaaataagctgctcaagggcggccatgatgcgctgaatgagcacaccgagtgggtgctgcattccatctcctgccgtgcagccatcaaagcaggggataagtcctcgccgcaggagctgctggcgctggccgaaaagatcctttccggcgaggtgccgcccttctgcccgcacggacgcccctgcgtactgaaattgacccgaaaggagctggaaaagcagtttggacgcatcgtgtaa

SEQ ID NO: 2574 - DNA, 1230 bp, unclassified Faecalibacterium
atgcgcagagcaaaactccgccgctttttccgcattgcggcagcttatcttctggttgccattctggctgcgctgggatggctctggcacagtctgccctctgagatcctgctggagcccgggcagtccctttccctgccccgcttttccttcatcgagcctctgcgcagcaccggctcccgcaatgccgccagcacacaggctgtaggcagctatcaggtcactttgtcgctgggcggctggctgcccatcaaaaccgtgcgcgcccttgtggagacccggcctgctgtcacagtctgcggcacgcctttcggcgtcaaaatgttctcagagggggcactcatcgtgggcttttccgatctgaacacggccgaaggcaccataaaccccgccaagaaagccgggctccggctgggtgaccgcgtggtgcgcatggacggcgttctgaccgagaccaacgatgcggtgcacgatgcgctggaagccgcagcaggcgctccggtgcggctgatctatatccgcgagggtgaacagttccagactcagctcacgcccgcatgggacagcaccgccgggcagtggcgcgccgggatgtgggtgcgtgattcctccgcaggcgtaggcaccatgacctttgtggacaacgatgctgaggtgtttgccggtctggggcatcccatcagcgacagtgataccggcgaaagcgttgcgctgcgcagcggcgagatcgtcccctgccagatcgtggggtgtaccagcggcaccgtaggcagcccgggtgagctgaaaggccgctttctgagcacccatgcgctgggcagcatctgcatcaacggcgagaccggggtctatggccggacacgcactgtattttccggcccggaagcagagattgcttttgcgcaggagatcgtgcccggcgatgcagagatctggaccacagtggacggagaagcgccccagcattaccagatccgcattgaaaaggtaaacgatgccgacccgcaccgcaacatgatcctgcatgtgacggaccggaggcttctggcaaagaccggcggcatcgtgcagggcatgagtggaagccccatcctgcagaacggcaggctggtgggtgccgtgacccacgtactggtaaatgacccgacacgcggctacggcatttttgcgcagaccatgctgaaacaggcgcattccattgaaaaaacagacgatgctgcgcagccatga

SEQ ID NO: 2575 - DNA, 1401 bp, unclassified Faecalibacterium
atggcgcagcgttttcaatctgccgtgtggaacagccttgtaaaatctgcgtggatgcttgacaaagcggacggcagcatctacaatgaaggcacggcaaacacggataagctgtttgccgcgggaagaagatggaacggccggtcatcggccgggcaggcgtcctgcctgccggaaaagggccctgtgctgcatgggcgcacggcaggcccggaggaaatgggaatgaaacagaatagaccctgccgccttgtgtgtgtgctgtgtgcgctggcttttgcgctgacagctctgcccatggcggcttttgcacagcagccggaggaaaccgccgctgtgcagcagagcctgacggctgcggatgtgcgcgggatgcagcaggcagatgctgcagtcacggagctgaccgacagcgaggattacacccggatgagcgaggacgagcgcatcgatgcagccctgcagcagctggaagaactgacccggcagggccttgtgaagcagggctctgtgtacaccgatgccgaaaacggcatggtgagctttacctacagctgcggtgcgctgggcggcattctggtcgcagacccggaggaggagaacgctgccgctctgccgcagctggagaaagaacagctgcagcagctggccgagaacaagcgggtgggcacggcggccatctattacgcctttgacaacaccatcaacagcgcccgctacccctactatgcctatatgcagacctattgggattcggtggggctgcagaccagactggacactaccgttaccgtgtccgacctgcgcaggatgggtgattacgacctgtgcatcctgagcacccatggtgcctactatacctatgaatacggctggctgtggaaaaggaccgccaccgagccgctgatcctgctgagcgaaaaatcagatttctggagcgacctgcgctatggtttcgacctgctggcccaccgtgtggtcaaggtgaacggcatgtatgccgtcaacggcgatttcttccgcagtgcataccggggcaatggcatcgtgctcagcgagacctgcgagttctatggcaagaacggccatgtggacaccgctatggcagacggcctgctggcaggcggtgccaaagccgtgatgggctatgtgaacaatgtgtactcggtgtactcccgcagcatgctgtgggccaccgtgaaccggatgatcgaaggcgaaacgctggagcaggccgtggactatgccaagagcatctacggcaccgatgatatcatctggtacaacgagcagggcggcagacggccccatgcagcggcatcctatgcgatgctgagcggaagccggagtgccgtgctgcccaacccctacacggcagaagaagctgcggctgcggcctga

SEQ ID NO: 2576 - DNA, 2736 bp, unclassified Faecalibacterium
atgaaaattgaaaacattttcgctgcgagtttcgctgccgatattattacctctaaatggggtccggacggtttcgtttcccgccggcaccgggaagaacggcagcagaactgcgcaagaaagatgaagatacgcgggtttgtgaacgctgtttccgaaatttttttgcgggaccccttgcttttttgcacggcttcggctatgctaaaggcgaagagaatgcttctgcctgagctcttaatcgttttcgcaaaaacgatgcagccggctgtcccggccgctgataaggaggaagcatttatgagattcggccattttgatgacgcacgcagggaatatgtcatcaccaccccgcagaccccgctgccgtggatcaactaccttggtagtgaagactttttcagtctggtctccaacacggcaggcggctacagcttttaccgggacgcccggctgcgccgcctgacccgctaccgctacaacagctccccgctggacatggacggccaccacatctacatcaaggatggcggcacggtctggaaccccggctggcagcccaccaagacgccgctggaccgctacagctgccgccacgggttgggctacaccattctggagggtgaaaaggacggcatctgcgccgcgcaggagctgttcgtgcccaagggcgatgcctgtgagctggaccgcctgaccctgaccaaccgcagcgatcgttcccgggagctggacgtgttcagctatgtggagttctgcctgtgggacgctgtagacgacagcaccaacttccagcgcaacttctccaccggcgaggtggaggtggagccgtgtgccatctaccacaagaccgagtaccgggagcgccgcgaccactatgcggtgttctggtccaacacccccgtcaccagctttgacaccgcccgggatgctttttgcggtgtgtatggcggcccggcagacccgcaggccgtccgtgccgggcactgcagcggcagcatcgcccacggctgggcaccggtgggtgcgctgcacatccatgtcacccttgcccccggggaggaaaagaagatcctcttcggtctgggctacatcgagaacccgcaggaggaaaagttcaccgcccccggcgtcatcaataagacccgcgcccacgccatgatggcccgctacgacgacgatgcacaggtggatgctgcccgtgctgcgttggccgaccactgggagagcctgctgtctggctaccggctgcagtccggtgaggaaaagctggaccgcatggtgaacctctggcatcagtaccagtgcatggtcaccttcaacatgagccgctctgccagctactacgagagcggcaccggccgcggcatgggcttccgggacagctgtcaggacctgcttggctttgtgcacatcgtccccgcccgggcgcgggagcgcattctggacattgccgccacccaattcgaggacggcagcgcctaccaccagtatcagcccctgaccaaaaagggcaaccgggatgtgggcaccggcttcaacgatgacccgctgtggctcattgccgccaccgccgcctacctgcgggagacgggcgactggtccattctggaagaacaggtggcctttgagaacgacgagcgcaaggcacagcctcttatggagcacctgcgccgcagctttcgctttacctgcacccatcttggcccccacggcctgccgctcattggccgcgcggactggaacgactgcctgaacctgaactgcttctcggagcacccgggcgagagcttccagatcaccggtcccagcgagggcccggtggccgagagcgtgttcattgcgggcatgttcgtcaagtacgggcgcgagtatgcagagctgtgcgaccgcctgcagcttgccgatgaggccgcagctgcccgccggagcatcgacgccgtggagcaggcggccctgaccgcaggctgggacggcgcatggttccggcgcgcctacgatgcttttggcaaccccgtgggcagcagggaatgcaccgagggacagatcttcattgagccgcagggcatgtgcgtcatggcaggcatcggcagggagaccgggcaggccgcgcaggcgctccggagcgtggaggagcggctggataccccatacggcgtggtgctgcaccagcccgcctacaccagctaccagctgaatctgggcgaaatttccagctatccgccgggatacaaggagaacgcaggcatcttctgccacaacaatccgtggatcagctgtgccgaaaccatgctgggccacggcgaccgggcctttgaggtgtaccgcaagacctgcccggcctacatcgaggatatttccgagatccaccgcaccgaaccctacgtctacagccagatggtggcgggcagggatgcgcccaccttcggcgaggcgaaaaacagctggctgaccggcacggccgcatggactttcgtcaatgtgagccagtacattctgggcatccagcccacgctggacggcctgcgggtagacccctgcatcccccacaccctgaccggctacaccgtcacccgccgctaccggggcgcagtgtatcacattgcagtggacaacaccgccgccgtgcagcacggcgtgcagagcatcacggtggacggcaaagcccttgcgggcaatgtgctgccgctggctgctgccgggaccacggtgcaggtgcaggtgaccatgggttaa

SEQ ID NO: 2577 - DNA, 1521 bp, unclassified Faecalibacterium
atggaactgaagatctttcgggacaccctgccgcaggcgggcgcaagctgcaccgtgaaggcagaactcccgctggaaaccgagatcctgatctcggactatctgccgccggtattcaagctggtcaaatgctttgcaaaaccggtggtgctgcagaaacagctgcagcccgggcggctgacgctggaaggctatctgcgctgcaccgtgttttatcagggcgagaatggcgcaggcctatgccagaccgaacagaaactgccctttacaaaacagttggaagtgccggaattttccttcaccagctggacggccatggtggaaggccagaccgaatatctcaactgccgggccgtgaacccgcaccgcattgaggtgcgcggagcctatggtctggtggccacgcttcatgcacaggacaaggcagagctgatcactgcgctggcggacggcggcattgagcagaagctgcaaaccctgaccggggtgcgcagtgcggcggtgctggaaaaactggtcacagtagagggagaaatggtgttcgcaaagcctcctgccgccattctggatattaccggcacggcatccgtacgggagataaagcttctggcgggcaaggctgttgtcaagggcgaggtacgtgtccaatgcgcctggcgcgcggacggcgatagcagcttgcaaagtcaggcggcatccctgccattcaatcaggtagtagatctggacggcgtggccgaggactgcaagtgcctgtgtgttttggaagcggttggttttgcgctgacggaaggggaacagggagccggtggtcagctgacagccagtgtgatgatgcatctgcacgcatggcggtcttgccaactgcagtacgtatcggatgcgttttccacccggtttgagaccaccgtcacgccgcaggagttggtggtagaggatcttgcctgcatgctgaacgagacggcttccgccaccgctgccggatctctgccggatgccggtgcacagctccgggcctgctttgtggcctacggaccggcacaggtggttccttatcgggacggctgggcttttaccgtgcgtgctgttgccacagcctttgcagaaaacagccttgccgagctggaaagttacgaaaaaacgctggagctggtctttccgcttgcggtggatgcaccgcagggtgcacagctcagcccggagtgctggctgagcactgagaatatccagtgcagctgtaccggcggcacgctggaggtcacagtgacagcccgcgcagagggagccatcctttgccgcagcacccatcagggcattggcggcgcagagttgggtgagccgctgaccgtgccagacccggagatcgcactgcgcatttactacgcgcaggccggagaagagcctttcggcattgcaaaacggttccatgtatcaccggcacagatgctggccgcaaacggtctggatgcaggaacacagaccctgccgcaggcgatgcattttctggtgccgggcgcataa

SEQ ID NO: 2578 - DNA, 1563 bp, unclassified Faecalibacterium
atgaagctgttttcctacctgtctgtggcggtgctgcttctaagcagcatcgcacttgcagcgtactccccggatctgctctccgcgctgatcgttggtcttatgtgcatcattgcactggccgggtgcatccatggccttttaccgaccatctccattacgggcggtctgctgaacggccaaaaaagcattcgcaaggcgtctgagaccgaaggcagctccgcatgggtcgcggccctgcagatcgaacgcttttttcagcagaagacgctggacggactgtttgaggattatcgcgaaaaagtgcagcatcagcgtgagaccgggcagatcgtcagcgatcttgacgaagtgctcaatgaagatgtgctggcgctgcacacatggaaaggcgtcatcgcgcagctgcccggcaccctgaccggtctgggcatccttggcaccttcgtgggtctgttgctgggcctgcggggcatcagcttcgtcacggtggaagccgcactgggcagcgtgcagtccattctggccggcatcaacacggcattctacacctctattgcaggcgtgatcctgtcgatcctcttcaacatcacaaacaatgtcctgcgcactatcatgaatcgtgagaccgggctgtttctggaagaattccacaagtcggtcattcccaccaccgacgagcaggcgcgctacagcagccgccgcgaagtgcggcagatcctggagctgctggagcgcctgcccagaaatgcgggcaacggcgttctgagccgcgagacggtgcaaagtgcaggcctcaacgagcgcgtactgatgccgcagatcctggacggcctgcgccggaacgagttcaccttcttcctgcagccccgatatgatctgaacacccgcagggtggtcggtgccgaagcactggtgcgctggaaccacccggtgctgggcgtgatctcgcccgccgtgttcatcccggtgctggaaaacaatggttacatcaccaagctggaccagtacatctgggaggaagtatgcaagactatccgggtgtggatcgatgcgggagtccgcccggtccccatcgcggtcaatgttacaaagacggatattctggccatcgatgtggcggagtttttctccgaaatgctcaaaaagtaccgtatcccgccaaaatatctgaacatcgatattgcaaagtctgcctatctggagacccatggtgcgctgagtgatacggaagcacagctgcagcagatgggcttccgggtgatattggacggctttgacggcgactatgtggaactgagcgcactgggcggctttggcaccgacctgctcaagctggatctgcgcagcgccgcgctgcagaataagaccgatgtgctgcccggtatttttgcacaggcccgcacgctccggctgaatctgctggccgagggcattgaaagcaccgagcagctgaacgtgctgcgcaaagccggctgcaccgaagggcagggatacctcttctcccgtccgctgtcggtggatgaatttgtcaggatcctgaaagtggggcactccggatga

SEQ ID NO: 2579 - DNA, 1701 bp, unclassified Faecalibacterium
ttgacgaaaaaatcatttctttgtttgccgaccggaaaaatctgcggatttttccggtcggctttttgcggggcgcatcagggaacaacgcaaatcttgaaaaagctgcaaaaccgcgctatacttacacatattataacaaaggaggagggcaggctgatgttttttcgttcgccgatcgtgcgctttttcaaccgcatcctgaaccgcgtcaccatcacggtggtgctggtagcgctgcagctgctgtggctgtgctgggtgttctattccattaccaccggtacaggccgtgtatgggtgaacggtctgctcaacgccctgagcctgctcattatcctgtaccttgtgcgcaaggacgagaacagcgcctataaggtgggctggatcgcactgatcggcatcctgccgctgctgggcggtgcactgtatctggcctttggcaacaaacgcccgagcaagcgcctgagcctgaaaatgcatgctgtggacagcgcacataaaaaagacctgcagcagcagccgggcgtactggacagtctggatgccggcgggcagggccagagccgttatgtggcaaagtatggcccctatccggcatggcagaacacccgtgcgcagtattttgccagcggcgaagcgatgtatccgcagctgctggccgatctggaaaaggcccaaaagagcatctttctggaatttttcatcgtgagccatggctgcatgtggaatggcatcgagaaggtcctgcgccgcaaggcggcacagggtgtggatgtgcgtctgatctacgatgattttggcagtctgctgggcctgcctgccgattttatcgtgcggatggagcgggcgcacatccgctgcatcccgttcaacccggtggtgcccctgatctcgctggtgatgaaccaccgcgaccaccgcaagatcgtagtcattgacggtacggtggcctacaccggcggtgtgaatctggcagatgagtatatcaacgcagagcagcgcttcggctactggaaggatgcagccctgcgtgtggaaggcgacgccgcgtggaactttacggtgatgttcctcaacttctggaacgcctttcgccccagcgagacggattatgatgcgtttcgccccatgccgctggtgccgctggtgccggacggcgtggtgcagccctatgcagacagtccgctggacgaggagcccatggcagaaaccgtttatctgaatatccttgcgcaggcaaaacagtatgtctacatctatacaccctaccttgcgatcggcgaggaaatgctggatgcgctgaaaaacgccgccaagcgcggggtggatgtccgtctggtgctgccgggcatcccggacaagaagctggtattccggttgagccggtcgtactatctgccgcttttgcgggcgggtgtacgcatttacgagttcacccccggcttcctgcacgccaagtgctgggtgagcgacgacagcaccgctgtggtgggcagcatcaacatggattaccgcagcctgttcctgcacttcgagtgcggcgtgctgctgcagaacaacagtcaggtgaccgtcctgcgggatgacgtgcgggatacgctgcgcaaatgccgggaggtacaggtatcggactgccataccggtctgctgggcactgtgctggacagcgtgctgcggctgctgagccctttaatgtaa

SEQ ID NO: 2580 - DNA, 1353 bp, unclassified Faecalibacterium
agaatgaagctgcgcagcatggaagaaaagatcagctaccgtctgtttctgatgggtttctttggcctgttgtttacagcggcactgtgtatctttgtgtttcataaagcctttactgcacaggcatggaccggccttgagcgggaggcggaactggtcagtgcaggatacgatctggtgcaggatccgcagcagcttacttcttttgtttccaatgatctgcgcatcactctgatctcgcaggatggcagcgtgctgtttgaatccgccacggatcagcccatggaaaaccatctttcccggccggagatccggcaggctatggccggcggcatcggccgggatatccgggactcgcaaaccatgggatatgagacctactattatgcagtgctgctgccgaacggcgagatcctgcgcactgcacaggacgccgaaacggtgtggtctatctacgattcctccattcccgccatcgtgctgagctgtgttgcgctgatgctggctgccgctgtgctggccaccctgctgacacgtgcgctggtgcagccggtgctgagcatgaccgaagaccttgaccatattcaggacaatgtgccatacaaagagctgatcccctttgcagagagcatccattccgaccgcatcctgcgcgaaaacaatgagaagatgcggcaggaattcaccgccaatgtcagccatgaactcaagacccctctgaccagcatttccggctatgccgagctcattgagaccggcattgcaaagccggaggatgtgccgggctttgcgcagaagatccatgtggaagccagccgcatgatccagctggtcaatgatatcctgcagctctccagtctggacaacgcaagcgagaccggctcggagcctgaaatggaaacggtcgatctgctgaacgttgcaaaggagtgtgtggagcgtcagaagctgaatgcccgccgggcttatatctcgctgacctgtctgggggaaagcgctcttgtacacggcaaccggcccctgctggatgagctgtgccagaacctgtgtgataacgccatccgctacaaccggcccggtggaaaagtgcagatcaccactgcctgcaatcgggacggccattgtaccctgactgtgacggacaatggcatcggcattccgaaagaagcacagaccagcgtgtttgagcgcttctaccgtgtggataagagccgcagcaaagcgaccggcggcaccggtctgggactggcgatcgtcaagcatattgcgctgatccatggtgcccgcatcaagctggaaagtcaggtggatgtgggtaccaccattaccgttactttccccactgcaaactga

SEQ ID NO: 2581 - DNA, 1365 bp, unclassified Faecalibacterium
atggcaaacaaaaagaaacaggacgaagcacttgctgcggtgcaggcacagacggaggagaatggtctgtcggcggcgcagagcggttattcggctgcgggactgggcagccgcgcggaggtggaaaatgcactggcaaatgccagctataagcccagccagacggtgacgagtgcagagaatgccctgaaggaatggcagacgaaccgccccgacgactacgagagccgctatcaggataagatcgatcagcttctgggccagctgctgcagcgcgggagcttccagtacagctacaccaaagacccgctctaccgtcagtacgagcagaactatctgcagaacgcccacaacgccagtgcggatgctgcggcacaggcggcagcactgaccggaggctacggctccagctatgcggcaagtgtggcgcagcaggcataccagcagcagatcggcgcactgagcagtgccatccctacgctgtacagtctggcgctggacacctataccagcggcggcaacgagctggtgagccagctggaccagctgaacagcagtgagcaggatgcgcagcagctgtacaacgaccggctgtcggattattacacccagctgcggcagaagggcgaagcctacaacaatgcatatgcgcaggactacggacagtatcaggactacctgaaccagctgggcacgctgcacgactactacagcgcacaggaacagcagcaggcagcacggcgtcagcaggcgttcaacaatgtggtgactgtactgggcgtactgggcgatgcggtgcagatcgccctcagcggcaccacgggtttgggttccatggtcagcggcctgctgaacaccggctacaacatctattccggcaaccgccagtacgaggcagaccgtgccgacacccagtggaaccagcagctgcaggagcggcagtatcaggacagcctgaagcagcagctctatgaaaatgaggccagcgagcgggaatatcaggacaagctcaatcagcagaaattcaacaacgacgtcaccagccagaagctgaacattgcaatgggcgagtggaatctgaaaaagaacaatgcggcccagaaggccagccgggcgggcagtgcggcatccggcacggcggcttccggcagcgcgggcagcggcagctcttccggtacggccaaccgcagcacaggcagcgccacccgtctgggcagcgacacttctcggaacgtgacggtgccctacatggcgatgctgatgcgcagtcagggcaaaaacgataccagcatcagcagtgcgctgcgcagggatggctattccagtgcagagattgcgcagatcctgcagcagatgaagcgctga

SEQ ID NO: 2582 - DNA, 1101 bp, unclassified Faecalibacterium
attcaggaggttaaaatgattttctcgatccgtgatctctcgtttgaacttggctcgctgcttctggaaggctggctggcgctggctgcgcgtgcggtgtgcgccctgctcatcctgctggccgcatggctcgtgcgccgctggctgaacaaaaagggcattccggcgctgcttgcccgcagctggtattttaccggcacgcccatcctgctgcgcagtttttccatccccgtcctgcgcatgtgcagtgtcgttggtgtgtatctggccgccgcttccctgccatgggccatttccggcattccaaagctgctgctgctctgtttccgtctcgccatgacccttctggtctgcgaagggttgtatgccgcatccgatctggccgacctgctgctggcttcctgcagcccagagatccgctccaacaaaacgctgcgctctctgctggataccacctacaaggtgctggtcatcgtgctgtgcgtggctgcgctggcgcaggaggtgggctttcccatcggcagcatcgtagccggtgccggacttgtcggcctgaccatttcgctggctgcacaggaaagcgccagcaacctgttttccggcatcgtcatcctgctggataagcccttctcggtgggtgactggatcaccgtgggcagtgtggagggcgaagtgatcgacatcaatttccgctccacccgcatccgctctctggataagaccatcaatgtcgtcaccaacagccagatctgtgcttccacggtaaagaacgcggccctgcgcaccatgcgtccctataagttcaaccttggcgtcacctacaatactacccgtcccaagctggaaaagctgatgaaagacctgcaggccatgctggatgccagcccgtataccaacaagggcaccaacatcgtacagctggcaaactttggggattccagcatcaacattctggtctccgcctatctggtgaccaatgtctacgccgagttcctgcagatgcagaacgacctgaacctgaatatcatggatatcatgcaggctgacggtgtggattttgcctttccctccaccagcgtgtacatcgaaaaaaattcctga

SEQ ID NO: 2583 - DNA, 984 bp, unclassified Faecalibacterium
atgaacaacccactcgtcagcattatcgtgccagtgtacaatgtgcagaatagtgttgcccgctgcctggagagcatctgtgcgcagacgtggaagaatatcgagatcattttggtcaacgacggttccagagatgaaagcttttcggtctgtgagcagttccgcgaaaaagacccgcgtatcgttttggtggacaagtccaattccggcgtgtcggacacccgcaactgcggcatgacccttgcatccggcaagtacgtacagtttgtggacagcgacgattatatcgagcctgattttaccgagcggctggtaacggccgccgagaccaacaatgccgatctggtgatcgccccctattggatggtgatcccggcaaactcctgcaaggccggtcaggctctggaaaacctgcaggagaaccttggcatcgaggaaaagcgtcccgatgatgtgcgcgaatacggttttctgcccgagggcatctatgaccgcgagacctttgccctgcgcctgatggaaaagcccgcatccttcttctacagcgttctgtggaacaagctctaccgccgcgacatccttgtggacaaccatctgcagttcaccagcgaggtgcgctgggccgaggatctggtattcaacctggaatacatcctgtacgccaacgtattcgtttccattcccaaggcaggctaccactatgtgcagaaccctcagagcatctgccacacccagatcaatctggcttccatcgtgcagaacaagctgcaggtgttccgctactacaaagatctttacacaaagctgggcctgtacgacaaggtgcagccgcagctgtacaaattcctgaccgcattctcggagaatgcctatcccgctggttcgccccagaagatcatcatggacatggccaaccgctggggctttggcgttctggatgcttccgacaaggaaaagaaacgccacgccaaatcagaggcctga

SEQ ID NO: 2584 - DNA, 768 bp, unclassified Faecalibacterium
ggtatactgaaagaaatgaatgaaaactgggaggaaaagagaatggcaggacagacgattctgatcgtggaggacgacccggacatccgggacggtgtgcgcatcctgctggcaggggaaggctatcatattctggaggcggaaaacggcctgcgggcattggaactgttcaacccggaggtggatcttgtcattctggacatcatgatgccgggtatgagcggcctgcgcgtgtgtgaggagctgcgcaagagctcaacggtgcccatcctgttcctcaccgcaaaatcgcaggaatccgataagctgttgggcctgactgcgggcggcgacgactatctggcaaaacccttctcctttacggagctcagtgcccgggtcaaggcactgctgcgccggtactgcgtctatctgggcaaggagcaggcaccgcagaagccgcgcaacaccacgctggaagcgcacggcgtgcggcttgcgctggactgcaaccgggtatgggtggatgagcgggaggtggacctgaccgagaccgaatacaagatcctgcggctgctgatgcagaacccgcagcgcatctattccatccaggtcatctacgaaacggtgtggaacgagccttattattatgtttccaacggcacggtgatggtgcacatccgcaatctgcgcatgaaggtggaggatgatccgcaaaaacccgcccgtatctgtaccgtgtggggcaaaggctaccgctttgctgccggagaggtaggccgcttatga

SEQ ID NO: 2585 - DNA, 1596 bp, unclassified Faecalibacterium
atgtccggcaaacgggtattggcgctgtatgcggccattctgttcagctttgcagtgattttgtgccgcctgtattttctggcacagaaccagacttatgcagcccgcgccaaagcgcaaagcgcggttcggcttgcgctgcctgcacggcgtggaaatttttatgaccatactggtgcactgctcaccgggctggaaacgcaatatctggccctctgcttcccgggcgaaaacagctattcccgcctgtatgcctataccgatgagaacggacaggcgcttttgtaccagaatcggaatcgttccatgccatttctgctaagggtggagcgtgatctttactggcagggagtgtcgtgctatccgtttgcccggcggtatgcgtcagcaccgttgtgccagcagctgatcggatatctggatggcgaaggccatggagctgccggactggaaaaagcactggacaagctgctgaccgggacgggggaacatgacgtcctgctgtgcgctgtcaccgctcagggacagctgcgagccggagaaacaccgcagtatctccggcaggacagcaaggctgtgggggtgcagctgaccatttcgcgtcaaatgcagcgcgcagcggaagcggtagcagcggagactatgaccagcgggtgcattttggttctggatacagcttctgccgccgtgcgggccagcgtcagcatgccgggctatgacccggataaccttgccgccagtctggacgcgccggacagcccattcctgaatcgagtgttggaatgctataccgtcggctcggtgttcaagccggtgctggcagcggcggcacaggaacagggcacttttccggaatatgaatgtacgggtgccgcagtgatagatggacagatcttccgctgcgcaggcggtgtgccgcatgggcagatcggactagaagaagcactggaaaaaagctgtaatggctattttgtacggctggggcagcagctgggtgcggaaaacttgctgcaagcggcgcagcgttttggatttgggcaggagataagcttagtaggaaatctgcatgctgcatccgggaacctgccggacgcagccgaacttgcccggagcggtcagcttgccaatttcagctttgggcagggcagcctgctggcatcgccggtgcagatcgccgccatgatgaatgccatcgcctccggcggggtgtaccacacaccgttttttctggaatgcacggttgacgaaaccgacggtacaccgctggaaacgcttgcgcatccgcagtcgaggcgggtgatgagtgcggaaaatgcagcgcttctgcgtaaaatgctttgtcaggtggtggaagagggcactgcacaggatgctgcagagctggaaggcggtgcgggcggcaagaccggcacggctcagaccggacagtttgatgctgacggaacagaacgcaagaatctgtggtttgcgggcttttacccggaagaaaagccccgctggacggcgatcgtgctgcaggacgggcagaccgaaacggcctattccagtgcagccatctttgcccggctgtgcgccatgcttcgtactctggcgtaa

SEQ ID NO: 2586 - DNA, 2103 bp, unclassified Faecalibacterium
atgaaaaaacgtcttctcgcatgtctgcttgcagcatgcatggctgtgtccatgctggtgctgccggcatcggcggccagcctgaacaactcggccatccagacggccatcacgctgggcgctatggataccagccagaccggcagtctggatgctgccgtcacccgcggtgcatttgccaggatgctggtctccttttcggcctaccgcgaaagcgcagcccagcagggcaacatcggcaccctgtataaggatgtgcccggcgcctcccagtgggcaccttatgtgcgcattgcggtgcagcagggctggatgaacggctacaccgacggcaccttccgtccggacaacgcagttacgctggaagaggcctgcacggcagcactcaagctgctgggctataaaatgaccgaactgaatggcgtgtttccgatggcgcagctgaccaaagcacaggaattgggtctgcgcaaccagctgaaccgcaatcagggcgagaccatgaactatggggattgtgctctgctgctgtataacaccctcacggcaaacacagccgccggcggcgcctatggcaccagtctgggctttacggtggcgaacggtcaggtggatacctctaccgtgatgctcaagagcctgaagggaccctttgtggcagcggaaggcacccagctgccgtttgcaccggtcagtgtttaccgcaacgataaagtttcggcttctgccgagctgaaccgttacgatgtgtattattacagcgaaagtctgcagactgtatggatctacacccgcaaagcagcaggccgcatcacagccgtttcgcccagcgccagcgcacccacggccgttaccgtggcaggcgtcagctatcagctgggcagcacggcagttgcctccaaggtatccagcctgaacggcggcggtgtgggcgaagtggtcaccctgctgctgggcatgaacaatgaagcggcagacgtgatcaccggcgcagaagccgatgaggtgttctacggcgtggtgcagggcgcagcccgcagccttgtggaagacaacggcgcggatgtgctgcagcgcgtgtcggtcatgtgcaccgacggcgttcagcgcactgtgaatgtggacaaaagcctgaactatcccacgggctggctggtggagatccgcgtaacgccggaaggcgagtccgtgagcggcatcgagaacaaggtcgttaccggcaaggtcagtgcggatgcggcaacgctgggcaagtacactctggcagacgatgtgcagattctggatacgacttcggagggtgtggctggggcgattcgtcccagccgcctagcggggacagacctgaatcttctgaatgtccgctactatacgctgaatgagaagggcgagatcgaccgcctgatcctgaacgatgtcaccggcgacctgtggacctatggcgtgctggacgacatcaaaaatgtttcggtcaactcttccgagctgaaaacgctggccaccatcctttcgaccggttccagcaccagcacggatacgcaggataagatcgtggacgacctgaagggtgttctggtgcccaccaccagcgaggtgctgtggggcgtgatcaacggcgacatcctctccaccgtctggcagaagatcacggccaacacggacagcctgctcagtctgggcctgcggcaggtgggcacccttgtaggggaaccctatgcgtcgatcttccgctacattggcggcggcgccacctatgtgtgctatgtcaatggttcgcaggtggcgttcaccaccaacgtcaaatatccggtgctggtgggcggtgttgcagcccgtaaggagaccaccggcagcgtaaagacgatggtccagctgatgcccatgaagatcgatcaggtgggcgcagcatcggtcatgagcaacgggaaacggtttgagatggcggacgatgcacaggtctacctgtggtataagggccagtattacgcgaccaagctgaccgaagtgaactcggacgactactatcttaccggctggtacgataactttggctgtgctgcgggcaagcgtgtgcgtgtcatcgtagctgtcaagaaggactga

SEQ ID NO: 2587 - DNA, 1068 bp, unclassified Faecalibacterium
atgaaatggatcagaacggcactgtgtgcgctgggaatgctggcgtgcctgtcactttcggcttttgcagcagagcttggagagccgaacatcacagagcagaccacgatgaaggagctgcgtgaaaaccccagcatcaagggttcgggcttttacacctactgcaacgagtggatcgagggcagcacaaaatacgacaacacgccgatcaagggctatgtgagctgggcggcctctgaggatgccgccgagggcatgaaccttgtgatcgagaactacaacaagggcgtgcaggtcacatggcaggtgtatacaccggaagagatcgaggcagacccggcgctgggcatggtgcagctgttttatttcccggcaaaaacggaaaacgccaaatatgtggtcgtggtgcccggcaacggaggcaacaccacggcagagctgaacgagggcgcatccatcgcgaaccagctgcacgatctgggctatgcggtgttcgtgctgcggtaccgttcgttcctgaatgcttccgacaacgcgccgctgtacgacattgccaatgccgtgaagtatctgactaaaaatgcagagcagttcggtgtccagcgcgagaactacgccctgatgggcttctcgtccggcggacacatcgtgggactgatcggctcggacaacgagcggttcggctacaaggcctttggcattcctcagccggcagcactgctgctgggttatcccatcaacgatttctatgaggtgaagccgctgtaccacattgccatcgacccgctcatgatcagctggcgttactactggaccaacatctcggatgtggtaaacaagaattacacccccaccttcttctggtacggcaaaaacgattattacatggagtgcatgaactacgaaaagcagggccccctgctggaaaagaccctgaaggagagcggtgcgacctatcagtgcgtggtgtatgaggacgccccgcacgccattggcccgggccgtcacacggatgcggacggatggatcaagctggctactgagttctgggaggaacagtgtaaataa

SEQ ID NO: 2588 - DNA, 1884 bp, unclassified Faecalibacterium
atgggagtattgctgctggacagcatcaatcagcccgcagatttaaaacaattaaatgaaaagcaggtagaacagctttgtgaggagatccgcagctttctgctgaaaaacatctctaaaaccggtggacatctggcgtcgaaccttggcatggtagagcttacagtggcattgcaccgcgtgctggagaccccgcaggataagatcgtattcgatgtgggccatcaatgctacacgcataagatccttacgggacgacgcggacagttcgatcagcttcgtcagttggacggcatttccggatttccaaacccgaacgaaagtgtgcacgatgcatttattgccgggcatggcaacacagccctttcgcttgctattggcatggcatgggccaaaaaactgcatcatgagcaggggcttgttgtggcagtgatcggtgatggtgcctttaccggcggcatggtctacgagggcatgaacaacatcgagcatctggacaacctgcttgtgatcctgaacgacaataaaatgtcgatctctaagaatgttggtgcgcttgcccgttatttgacccatctgcgtacgaccaccgcctatgtggatgccaaggataatgtgcgcagttttttggatgccgtcccgctggtgggcaccccgctgaaaaaaaccctcaccgattgtaaaacgctcctgcgccgtgcgatgtaccactccacgatgttcgaggatatggggttccagtatcttggccctgtggatggccacaatgtggaagagctggaacgcacactccgcacgctccgcggtcggccggggccgcactttttgcatgttatcacgaaaaaaggtaagggctatcagcccgccgaagtgaatcccggcaactatcacggagtttctgctttcgatctggacgggatgcccgacccggaagtggcacccaaggagtcattctcaactgtatttggcaaagcactcgtgacagaaggagagaaaaatcagaatctctgtgctattacagcagcgatgaaatatggcaccggtcttcagttttttgcacacagccatccaacacgcttttttgatgtcggaatggcagagcagcacgctgtcacctttgcagcaggccttgcaagtcagggaatgctgccggtagtctgcatttattccacctttctgcagcgctcctatgatcagatcattcacgatgtcaatttgctgcaggaaaatgtggtgtttgcgatcgaccgcgcaggctttgttcccggggacggcgagacccatcagggaatctatgacccggcttttctgagccagatcaatatcccattgtatgcaccttccaattatcaggagctgacctactggctgcagcaactgctgagcgaccgcttccatggcccgcgtgcgatccgttatccgcgcggtggacaggatgctgtgctggcaggatttggctgcagcggtcaggagtacgattatctgtataagaacgagaatgcaacaatcgttctggtgagctatgcggatgaattgaccgatgttttacaggctgcacaggaactgaagcaaaaagatatcgtgtgtgacgtactgaagcttgtaaagctatatccctttacagataaaatgctcgatgaactgataaaatatcagaaaattttgcttgcagaagaatgcgttgcaaacggaagcattggcgagcatttggagtatgttttacagcaaaaaggatgggacggatgttttatccatctttctgtgcgggatgtgtgtcttcctcatgccagtgtggcgcagatcaaacaggcaacaggactggatgctgccagtcttgtacagacggttcagatggccgtgacgaaaggagaaagtttatcgtga

SEQ ID NO: 2589 - DNA, 1119 bp, unclassified Faecalibacterium
atgattatgacaatgaaagttcaaagcctgacggacctgcaggaccgccgtattatgctggacagggatgtgccgccctacggttacgcctttgtcattctggtgggcatctttatggtgttccttctggtgtggagcacccagaccaaccgcatttatgtcagtcagaacaccggcaccgtgcaggccagcaacaagacctacatcatgtccagctattccggttccatcaccgaaatgtatatctcggaaggcagctatgtgaacgagggcgaccttgtggcgcacatcaagagcaccgacatcgatatgcagcaggacaatctggaaagccagctcaagatctaccagacccagctggaccagtataataagctgctgcagtgcgtgcaggacgacaccaactacttcagcgagacgaacccggaagatcagccttactactaccagtacgagacctacaagagtcaggtctcgcaaaagacctttgacgctactgcctatcaggctgccggctattcggatgctcagatcaagaccatgatggagcagagccagagcgaggtggaggccttgtactactccaccatgcagtccatttcccagagcatcaccagtgcgcagagcaacgtggacaacattcaggcccagatcgataccctgaacaccggtgccaacgattattatatctatgctcccacctccggtgtgatccacatggatactccctataaggagggcatggtcctgagcgctggttctccgctggctactgtcgccagtgagaacgacgatctggaggtcgttgccatggtcactgtgaacgaccgccccctgctgcatgtgggcgacccctgcaagatcgccatcaccggcctgtcggagtactcctacggtaccctgaccggcaccgtgaccgcgatcgacagcgatgtgaccgccagcaccaatgcatcctactacaaaatgaccatcaagccggataccacctacgtggtaagcaagagcggtgataaggtagacctttccaacggcatgagcgttaccgcccgtgtggagtacgaccagatcacttactttgagtacgcaatggaagcactgggtgttctgttccattaa

SEQ ID NO: 2590 - DNA, 1053 bp, unclassified Faecalibacterium
ttgcagaagctgaaaggagaatcgaccgtgaataccgctgtaccgtcccatttccgcaaaaaactgctgagccttgtgctgacgttggtggtaatgctcacctgcctgcctgctgctctggcagtggacctgaatgtggacgcgggcttctatttcaagcagagccgcggcggcacctgcacgctggcatccgcagccatgatgctgcgccgccgggcgtatcttgatggtctgacggattggaccgctgtgacagaaaacagtgtacgctccacggcatgggccaacggtctctctcacagctttacatataaggaaatgcaggtgggctacggaaccctgccttcccgcaaacaggaaaagatccagaccctcattactctgctgtcgcagcatccggagggcatcgtgctgtatgaccgcagacagccccatgcgctgctgctgaccgattacaccaatggtactttctactgctccgacccggcagggaatatttcttccggccgtatcccgctggaaaattccagtgtttcgatcaacggctcttcctgctattggtacgtggcatccgatcacaacgcggttgcatcctcgccggacagcctgcggctggagggtatgagttatcccatcaacatccatgcaggcaagggcatggctatgaccggtaccgcgaacgctgcactgggtatgacgctgaccgatgttcaggtggcggtgctggatgaaaatgaccagactgtggtcacggcgcaggcatcgcccaatgcggcaggcttctccttcaagacgctggacagcgagatccgttttggcgaactgcctgcaggcagctacacttacatggtgattgtgaccgactccaatggcgataacctttgcttcaccagcgactttacggtttcggatggttctgcaagcaccggaacctactggtcggtaaaagataccgagggtgccaagctgctggacagcattcaggaagttcaggattcgtttaccagtgcaaccgagtccacgctgggctggcttgaaagcctcttccactaa

SEQ ID NO: 2591 - DNA, 2490 bp, unclassified Faecalibacterium
ttgtcctctatccatctgcccatccgccagctggtggagtttctgctgcgcaccggcagcattgacagccgttttaccggctttgaccgcgcactggaaggtgcacgcatccaccgcaagctgcaaaaagcggccggagaggactatcaggctgaggtgtttctctctgccgagcggcaggcagaggggctcacgttccttctggaaggacgtgcggacggcatttttaccgacggttccggcacgacggtcattgacgagatcaagaccaccgctgtcccctatgaagcgatcaccgaggatatgaacccctgtcactgggcgcagggcatggtatacggtgccatttactgttcccggcaaagcctgccggaattgaacgtccaactgacctattatcagatcgatacggatcagatcatccgctttgtgcgtcacttttccgcaccggagctggagcagtttctgcacaaacttctttgtcagtacgcaccatgggcacggcggcagctggactgggcggcaagacgcagccagagccttgctgctctgccgtttccttttgcgcagtaccgccccgggcagcgggcactggcgggggaagtctcccgcgcctgccgcaccggaagggatgccgaccacaaaggcggcagccgtctgttctgtcaggcccccaccggcatcggcaagaccatgagcgtcctcttccccgccctgcgggccatgggtgagggcagcggcgaaaaactcttttacctcaccgcccgcaatacgactcaggccgcggccgaggatgccattgcccggctgcgcactgccgcgccggaacttgcgctgcgcagcgtgaccctgaccgccaaggaaaaggtctgtcttcatccggacccggaagggcatcctgcttgtctgccggaactctgtccctatgccaacggctactatgatcgcatcaaagatgccctgtccgcactgctggacgataccggcagctttgaccgcgccgcgctggccggggcggcaaagcgtttttcggtgtgtccctttgagctggggctggacctgagcgaatggtgcgatgtggtgatcggcgactacaattatctgttcgaccccgtcgtacacctgaagcggttctttgatgcttccggcgactggctgttcctgatcgacgaggcacacaaccttcccgaccgggccagagccatgtactccgcacgctttttcaaaagcagtctgaccgaggcaaaacgcgccctcggcaaaggaaaaagttccctccggaccgcactgacccgcgcagaccgggcgtttctggatatccggaaagcctgcgtgcgtctggcaccgcgccgcggccagaccgacgcaccggaaaccaacaccgctcagaccacccttctgccgtctttgcaggaccctgtgccggaactgcccgagccgctgtatgcacaggacggctccgtgtttttgcgggagcttccgtctgctctgctcagcccgctgcgggcggtgcaggctcccttgcaggattggctggaagcgaacccggacgcggatgcccacacgcagctgttggagctttattttgcagtgcaggatatcctccgctcttccgaacggtacgacagtcattttgtcacccagctgactgcccgcggcagtgagctggaactgcagctgttgtgtctggacccggcgccctttgtggaggccagccttgctgccggacgctgtgccgcattgttcagtgcaacacttaccccgcccagctattatcggggcgtgctgggctgcgcggatgcccgggccgtggcgttgcccagcccctttcccgccgaaaatctcggtctttactgcatggcaaatatctccacccgctaccgcgaccgtgaaaccagtgtgcaggccgtttcggatgcactggcccggctgaccggcggaaaaaccggcaattatctggcgtttttcccaagctacgcctatctccggcaggtatatgaagattttgcagcgcgccacccggacatccgcacgcttgtgcaggagagcggcgcagacgatgccgcccgggcagaatttcttgcacaatttatgccgcagccaaaagaaactctgctgggttttggggtgctgggcggtgtttttggcgagggcgtggatcttgcaggcgaccggctcatcgggtgtgcgatcgtgggggtcggtctgccgcaggtgaacccccagcaggaaatgctgcgccgctactacgatgcacaaaacggctccggattcgactatgcctaccgctatcccggcatgaacaaggtgctgcaggccgccgggagggtcatccgcacaccggaggacaggggtgtggtgcttttgctggacgaccgctttgcccggccggattatgcccggctgttcccgccgcactggcagcacatccggtatctgcacagcgccgaggagcttgggcaggcgctgcgggatttctggcagaaatag

SEQ ID NO: 2592 - DNA, 1776 bp, unclassified Faecalibacterium
atgatcccacacgaatacattgaggaactgacccgccgcaccgacattgtagagctggtgggcagctatgtgcagctcaagcgcaaagggcggctgtacggcggtctgtgtcccttccacagcgagaaaacgccctccttctatgtctacccggatacccagagcttctactgctttggctgtcaggcggcaggcgatgccatcagctttgtcagaaagatcaacagcatcgattacccggaggccgtcaagctgctggcggcgcgggccggaatgcccgaaccgcaggaggacgacaagacaggccggatgcgcagccgcatcctttccatgaacaaggaggctgcgcgctttttccatgcctgtctgaactccactgtggaggaagcacggcaggcgcgggcctactggcggcggcgcggactggacgataagaccattgcacggttcgggctgggctatgcacccgatgacggacaggccctgtacctgtacctgcgggataagggctacaaccagcaggagctggatgccagcggcctgttcaagcgcagccagtccggccgtatctactgcctgttctggaagcgggtgatgacccccatctttgacctgcggggcaatatcatcgcgttcggcgggcgggtgctggacgattccaaaccaaagtatgtcaacagcccggaaacgctggtgtaccacaaatcggaaacggtatttgcattgcagatcgcaaagcgcagtgcagtgcgccggttcgtgctgtgtgagggctacatggacgtgatcagtatgcatcaggcggggatcgatactgcggtgtgcgcctgcggcacggccctgacaccggagcaggtgcggctcatcagcgaatatgcagatgaggtcattctgagctacgattccgacgaggccggccagaaggcgaccctgcgttcactggaactgttccgcaacagcccggtgaaagtgggcgttttgcagatccccggggcgaaagacccggatgagtacatcaaaaagtacggtgcagaacggttcaaggcgctgctggacggtgtgggcaatgcactggatttccggctgggccgtctgcgcagccagtacgatctggcacaggatgcgcagcggctggaatacgtcaaggaagctgtgaatatgctggcagagcgctccaaccctaccgagcaggaggtgtatgcgggccgtctggcagaggagaccaatatctccaaaacagccattatgacccagctggaaacggcagtgaaaaaggccggaaacaggcgccgctgggagaaacggcagcaggtgctcaagtccggcgaaatgaaccagatcaagctgccctacagtgcgggcggcagtcaggcgctggggatcgcaagtgcacagcagcggctgctggcagcgatcctgcgggagccgcagtatctgaagctggctgagaaggagttgttgccggagcagttcatccagccccagcaaaaggagctgtacgaagccatgcttcgctgcagcagggaaggcattgagatcaacctgaccacactgcgggcctatgtcagtgaagaagcgctgaatgagctgagccgttttgcggcacaatacagcgaagtgaattgcacgccggacgatatccggctgtatctggaccgcattgcccgggggatgcccgtggcaggcaaggcggcgcatatgtccaatgaggaactgagtgattacctccagtcgatgcgcgaaaaaaagcagggaagcgttcctgtagaagaatga

SEQ ID NO: 2593 - DNA, 960 bp, unclassified Faecalibacterium
atggcagaaaagaacattgaactggatagcgtagaggtggctgcggcggtctttggcaattgtgaccgcaacatccgtctgctggaacacgaattttcggttacggcagtctgccgaggcacgcagctgcggctctcgggcgagcctgccaacgttgccgctgcaaaccgtgccgtggaagggatgctgcttctgatggaaaatcatacgccgctggaggatcagacggtgcgttactgcatcagtctggctcacgacggtgcggaaaagcgggtcaaggaactgaccgaggactttgtaacggtgacggtcaagggccgtcctatccggcctaagaccttgggacagaaagaatacctgaatgcgatccgcagcaatgccatcacctttggcgttggcccggcgggcacaggcaagacctatctggctgtggccatggcagtgaaagcgttcaaggccaaggaagtatcccgcattgtgctgacccgcccggcagtggaagcaggcgagaagctgggcttcctgcccggtgatctgcagcagaaggtagacccttatctgcgcccactgtatgacggcctgtttgatatgctgggtgccgagacctatgagcgtcttgtggaaaaacagatcattgaggtggcgcctcttgcctatatgcgaggccgcacgctggacgattcctttattattctggacgaggcccagaacaccacgcccgagcagatgaaaatgtttctgacccgcatgggagtgggttccaaggtcgtggtcaccggtgatgtgacccagatcgacctgccagagcgaacacgcagcggccttgtagacgcactgcatgtgctcaagaatgtgaacggcattgcgcagtgctacttcacggaaaaggacgttgtgcgtcatcgccttgtgcaggagatcatcaaggcctatgaaaaagctgcacaccctgaaaaataa

SEQ ID NO: 2594 - DNA, 1080 bp, unclassified Faecalibacterium
atgcagaaattgtcgcaaacggaggaattggcccgggaactggcctcccatgcccgccgtcacaccgtgacgccggaacagatcagccgtgctatggacgagaaggattacgatgtggcacagctggatgagctgtatgctgcattggagacccgcggcgtacatctggccgaagaagagaccgagctgcctgcactggacgaaacgcagatcggcaggctggagcatgagctttcggccgaaggcgtggcactggatgacccggtaaagacctatctgaaggagatcggacaggtgccgctgctgacggcagaacaggaaacggagcttgcccgtgcggcgcaggccggagacgaggatgcccgccgtcacctgagcgaagcaaatctgcggctggtggtgtcggtggcaaaacgctacgccgggcggggactgccgtttcttgatctgattcaggagggcaatctgggtctgatgaaggctgcagaaaaatttgagccggaacggggcttcaagttttccacctatgccacatggtggatccggcagtccatcacacgggccattgcggatcaggggagaacgatccgcatcccggtgcatctggtggagagcatcaaccgggtcaaaaagacggcgggcgacctgctgcgcaaaaatggccgggagcctacggtggaggaaatcgctgtgcggctggatatggagcctgcccgggtgcgggagcttttgcagctggcacaggaccccatcagtctggaaacaccagtgggtgaagaagaggacgcccaccttgaggattttattcaggacgaggaagcgggcgtcccggtggatgaagccgggcggcagctgctgcgccgggagctgttcagcgtgctcaagagcctgacgccccgggaagagcgggtgatcgcactgcggttcgggctggaggatggccgggcccgcacgctggaggaactgggcaaagagttcaacgtgacgcgggagcgggtgcggcagatcgaagccaaggccctgcgcaagctgaggcaccccagtcgtgcaaagcgcctgcgggattacttggatgagtga

SEQ ID NO: 2595 - DNA, 1488 bp, unclassified Faecalibacterium
atggcaccgaacaaaaccacgcggggcgggatctccctgcgccgcagggtcacggcatggcttgccgcgattttgctggtaacgatgctttccaacggcatcgccacggtggtgggtcagtgggccgtgcgcgcctttgacgcgctgctggccgacaatgccgcctgttacacggtgcaggatgccatcaaggacgaaacacaggcttttgcacgctatgtgcggcagcccacctcggaaagtgagcaggcctacaccgccgcctgcgctgcggccgaacagagccttgcggccctgcccttcgattatgcccgcatcggtgcggaacgctatgcccgcacatggaaccttttgcagggctacgagggctaccggcaggagcgggacgcttttttacagctttcgccctcagcggatacctacattgaacggatgtaccatgtgatggccctgcaggattatcttgctgagtatgcactgcggctgacgcaggccacactggaacaggaaaataccctttacagcagcacggcagcccacatccggcatctgccgtggctgtatctgggcctgttcctgacggcggcagcactgatggtgctgctggtgcggggactgagccgcgcggtggtgcgcccgctgctggagctggcgcaggcttcccgcagcattgccgagggggatctttccggtccggatctgccgataaaaagcagcgacgaggtggggcggctgacaggcaccttcaaccagatgaagcacgccatggcccagcagctgagcacccagcaggccctgcaccgggaagaggtgcggaaccttgcattggaaaaagatctggaacacacccggttggaagtgctcaagagtcaggtgaacccgcatttcctgttcaataccctgaacatgatctcctgcatggcccggctggaggacgcttccaccaccgaccagatgatcgtgcatctgggcagcctgttccggcacaatctgcgcaccaagcgtcagcagatcacactggaagaggaactggacgggctggaagattatatctatctgcagcagatgcggttcgatggacgcattacggtggaaaagagcatccgggtgcagcctgcggcggtgctggtgccgtcttttatactgcagccggtggtggaaaatgcatactctcacgggctcaagtcctgcgaggaaggggggcgcatcctgctgcgggcatggatgcagggcagcgtgctggtgctcacggtcgcggacaacggcaggggaatgacggcagaggaactggataccctgcaggtccggatcgcccagagtgagcagaccggccgcagcatcggccttggcaatatttcccgccgcatcgggatgctgtatccgggcggcaaaatgcaggtatacagccgcgcaggccgcggcacagtggtgcggtttgagatcccacagacgcagtggacggaagaaagggagggagaaccttcgtga

SEQ ID NO: 2596 - DNA, 663 bp, unclassified Faecalibacterium
atgaagcacagttggttttcgcgccatcccatctgtttcatggcgctttatctgttgttttatctttccgcattcaattttctggagacgcggatctccatgccccatctggtgctggtgcactgccggctggacgacctgatccccttctgcaaatatgccgtcatcccctattttgcatggttcgtgtggatcccattcacactgttctatctgctgtggcgtgccccgcgggaggacttctggcggctgtgcctgccgctgtttgccggcatgaccatcgcactggcctgctatgtcatccttcccaccggccttgccctgcggccctattacgtgccgggcaacgacttttttgcccgcaccgtgcggacgctgtaccgcaccgatacccccaccaacgtgtgcccgtccatccatgtgttcaactcggtaacgctgctgctggcgtactaccgctgccgcatttttgagcagccgcgccgccgctggatgcgtccggccgctgccgtgctgtgcatttccatcgtgtgctccaccgtgctgctcaagcagcacagctgcatcgatgtggcgctgggcgccttgctggcactggcactggatgccctgttcacccgctccgaggagcgcagcgaagtgccacagatgcggtggaattga

SEQ ID NO: 2597 - DNA, 693 bp, unclassified Faecalibacterium
atgtctgttcgccaaaaagtgccggaggatcttaccgccaggaaggctctggcattggaggtcattgaccgtctgaaaaaagagtatccggatgccggatgcaccttggactacgcccatgcatggcagctgcttgtcagtgtccggctggccgcgcagtgtacggatgcccgcgtgaatatcgtggtcgaggacctgttcgccaaataccccagtgtagccgcactggctgccgcagaaccggaggacatcgaagccattgtgaaaccctgcggccttgggcactccaaagcgcgggatatctccgcctgtatgcggatgctgcgggacaaatacgattgtcaggtccccgccacttttgaagaactgctggctctgcccggcgtgggccgcaagagcgcaaacctcatcatgggcgatgtgtttggcaagccagccatcgtgacagatacccactgcatccggctgtgcaacaggatcggccttgtggacggcatcaaggagccgcagaaagtagaaatggccctgtggaagatcatcccgcccgaggaaggcagcgatctgtgtcatcgttttgtgatgcatggccgggctgtgtgcaatgcgcgcaaaccggaatgcgaacactgttgtttggaggccatctgccgctatgcgcaggagcaatccgatacacagacggcaggatcataa

SEQ ID NO: 2598 - DNA, 948 bp, unclassified Faecalibacterium
atggcccttggtcggcctgttggaggagagcgcaaaacgatgaacgatcttggcggcaaggcatactatcatctgcccggcctgtttgaattttatgagctgtaccgtgtgtttctgcccctgttccgggagcaccgcgcgtatttctacgactggtgcgagatcggttccatctacggagccccggcagactgcatctggggcgggggccgtgcaggctttggcgaccagagcgcaaaagaggtgcgggcgctgctgcgggagtacggcatctctgcccggctcaccttcagcaattcactgctgcagaaggagcacctgcgcgacccgaaatgcaatgccctgtgtgcgctgtttgaagcgggcagcggcgtgcagaatggggtcatcgtacactcggagctgctgctggagtacctgaaagcgcggtacccgggtttttactttgtgtcctccaccaccaaggtcctgacggagtttgcccagctgcgcagggaactggaacgggaggagttccgctttgtggtgccggatttccggctgaacaaagcgtttgaccagctcaaaggactgccgcagccccagaaggataaggtggaatttctctgcaatgagtgctgctggcccggctgcaaagaccggaagctgtgctatgagaccgtcagccgcaaaaaccttggcgaagcctgcccggagcacgtatgtaccgcacccgatgcacaggagggctaccgcttttccagagcaatgcagagcccggcgtttatcgggacggaggagatctgcaggacctacctgcccatgggcttttcccatttcaagatcgaaggcagaggccttggcagcgcgctgatcctggaatttctgctgtactacatgacaaagccggaatatcagctgcaggtgcgggaagcgatctatctggacagtatgctggatctgttctga

SEQ ID NO: 2599 - DNA, 1326 bp, unclassified Faecalibacterium
atggaagccgcccgcagacaatacagacaaaaagagacgacatgggccccgccgctgcagcgggacccggggccgtggagccggctggtgatcaactggatggcaacgctggcggtcattatggcgtttggccttgtgatgctgtacagcgcaagctacaccaccggctacctgcgcatgggcgacagcctgcactacatcaagcagcagatcctctgcatggccattggcatcggatgcatggcagccatgagctatgtggatcaccgctttctgcgctgggcgtgcaagccgtgttactggatcgtgctgatcatgctggcagctacgctggcctttccgccgctgaacggctgccgccgctggatccgtctgggaggactgaccctgcagacctctgaggtggctaagtttgagatgatcctgctcacggcgcatctggcgtccagtgcaccgcagatcgggcggttccgtccgtccctgaaagaaaaggtccggctgaaggactggctgttcatccgcatcgtgcggcagatcatcctgccggtgctgccgctggtaccggtgctggtgctgctgatcatggaaccgcacatgtccggcatcctgctgaccaccgccattgtgggcaccatcctgatgatgagcggcagcggcggcatcattacatgggcaggagcaggcactgcggcgctgctgctggaaacgctgctgacccatgtggattcaattgagtacctgcagaaccgcctgaaaacatggtcggacgatctggaaaaagtgaacccccagaccaagcagagcctgtatgccattggctccggcggcctgaagggccttggccttggcaacagcgtggaaaagcagctctggctgccggagagcaccaacgactttatcttcagcgtggtatgcgaggagctgggcttcatcggggccacgctcatcatcgtgctgtttatcctgttcatcgtgcagggcctgctgatcgcctacaaggccgagaatcagttctgcaccatggtgggcatcggcattatggcacagatcgcatggcaggtgttctgcaacatcgccgttgtcaccaataccatcccgaacaccggcatcagtctgcccttcttttcgtccggcggcaccagcctgatcctgctgctggcagaaatgggcgtgatggtgaacattgggcgcaacggagaacgagcggcccagcagcgggctgtagaccacgcccggcgggaggcagagcgtgcggcgcaggaggccgaacgggccagcaggaccatcaatctggaagatgcccgccgtgcacagaacgggaaatga

SEQ ID NO: 2600 - DNA, 1176 bp, unclassified Faecalibacterium
ttgaaaaaatggtcgcttttcgccgggagaaaaggctgtcttttgtgcacggttgataaaaaaaaaatcgcattccgggataaaccggaaaaagcgcatcttgcaggacgagtgaaagcggtttataataagcatgaaaacgtttacacacaacaatgcaccccaaaagagagaagtaccgcgaatatgaccatcagtgatattgcaagaatggctggcgtgtccagtgaggccgtcagccgttacctgaacggcgggcctctgagtgagcagaagcgtgccatcatccgggaggtcgtggagaagaccggctaccgccccgatacgaccgctcagaccctgcgcaccggcaaagtgaatcaggtcggcgtgatcgcccccagcatcggctcccagtcggtcgggcagctcaccgccgggatcgccagtgagctggatgccagaaactatctgctgctgctgggaaacaccgagctggacgcccagcgggagctgggctatctgactgccatgcagcgcaaccacgtggcgggcattatcctgctgggcagctactatacccctcagctggcacaggcgctgaaaaactgcagtgtaccggtggtggtcacaggccagcgttttccggacgtggcctgcgtgtacaacgacgaccataccgccgcccgggagctgacccagcggatgctggagcatggccgcagaaggatcgtttacattggcggctccgaacgggacgatgccaccggcatccagcgccgggaaggcgtgcaggatgccttgagggacgcagggctggatggcgaccagctgccccgcatctgctgcaatgcattcaccgtggaagaggggcagcgctgtatgcaggagctgctgacccgctgcccgtttctggatggtgtggtctgcgtgaccgatacggtggcctttggcgccatgcatgcgctcaagcaggcaggacggcagatcggccgggatgtgggccttgcagggattggcgacagctgggcgggcagtgtgaccgacccgggtctggccacggtacggttttatcagaagcaggtggggcaggaagccgcccggatcctgctgcagatgctggaagagaaggaatatggcggcccggtgcgtcaggtgacgctggggtatcaggtagtggagcgcggttctctgtaa

SEQ ID NO: 2601 - DNA, 957 bp, Holdemanella biformis
atgaccgaatggattgaacaagataaaaaggatgaaaaccacttgtatgtacatttaaaagatccaagtttattagatttatccatctttgatcgaatgtcgaatgatgatttttgtcttccttgtatgctgacaaatgaaaaaagcgcatccattgtttatgcgacagaaggctatattcctttacatgattttttgagtcaatatgtatttgaaaatgaggaaggatatattttcttgcatcaactttttgaacaggctatcgcatccaatcgaaataaacctgttttatttgatccggattatgtatttgtttccggctttggcgatcggtttgcctttgtggttgtccctatacaaatctcgaattggatgtttcaaaaagatatgtctgaaaaatgggttgagtatatcgcaaagactatgcaaacgacaaccgcatttgaaattcctggctttttattgaaatttttaaagagtgcagagtttagtttgcccaatcttgtcttaggacttgataatatccgtacgttatattatccaaaaaaattctcttttttcaaacacaggcgtatacagacatttaaagtcaaagaacccatacaagcttttcatagaaatcaacctgttgaatctagttcggaagataaaacacagctcttacaagttcaagtaaacttttctgcttatttaaagattgaacaagatacatacgctttatcaaatgaaattaatttagtgggaagagctatgatttgtgatgtcagacttcaagatataagtgtctctttaaaacatgccaagattgtttgtgaaaatgacaggtattatattcaagatttaaagagcacgaataaaacgtatttaaatggaaaagaagtcaagcgaaagatgcgtttaaaaaatggaatgaaagtacgatttggcgatgttgaatgtgaatttaaagaaggatag

SEQ ID NO: 2602 - DNA, 1116 bp, Holdemanella biformis
gaggtcattatgcagcagatacaattaccacaaggaatgaaagataccattttacaagaatgtgaaaagaaaaaatatctacaaaatactttagaacaaattttcgaatcttttggatatgaagaaatcattacaccaacaattgagtattatgagacgtatgaaaatgcatttaaaaatattcaaacgacggatatgtataaattttttgatgagaatggaagaattctaacattaagaactgatatgaccgttcctattgcacgtgtatgtgcaagtaaatttaaagattcgaagcctccatttcgctatcgatatacttcaaatgtatttaaagtacgacaaaagtttgccggtaaaagaagtgaagttacagattgtggcattgaattaattgggttggattcaaaaagtgatgttcaagtattatgttgtgctttagaagtgatgaagaattttaaaaactacacattggaaattggaaatgtacaattttttcaagccgcttgtaaagtcgttcgcttaagcacagaagaaattaatactttagcggatttgattgataaaaagagtatggtcgatttaaaaatatatttagattcattatatttaagtgaaaaaattgtggatttctttatgcacctgccatttctttgtggagatgtaaatgtcttggatgaagcatacgcatattgttttgatgaatctttaaaagaggtcttggattcgatgaaagaatgcattcaatctttaaatgaattgggatgtttagaaaatgtgacaatcgacttaggaaaagtggcacatcttgactactatacaggaatcatttttgaaggctatgtatctggtgttggaacaagtattttaagtggaggaagatatgattgtttacttaaaaaatttggtcgagacctaccggcatgtggctttagtgtaaagctagatccactgattgatcatgtggatgtgcaacttaaaaagaaatttatactttattatccagaatccaaacaaactgaagctatgaaacaagcaaataagttacgaaaagtaggaagtgtaatattagagccttccttaaatgaaacaatttatgtaaaggaggtagaatga

SEQ ID NO: 2603 - DNA, 837 bp, Holdemanella biformis
atgcgtaaatttactcgaattcaaaaaagattacttacgattattgtcgttttatgtatattagcgtgtgctatgtttggcttaagacaaaactccatcacaaatattggttacagtgcttggacatatttgaaatatggtttgattcaatatccactatcatcgattggaaatgcggtaaatgatttttcaaatttatggcatgcctatgacgataatgaatatttgacgaaacaattagctcaacaaaaaaactatcaaacggcatatgaagatgaaagaaataaaaacaaacaacttgaagccttgttggaaatgaaaggtggtctaggggatgctaagacaatcagtgtatctgtattagaacgttcaggcgattcatggcttcagacggtaacgatttcagcaggaaaaaaacaaggtgtcgaaaaaaatatgcttgtggcaacaagcgatggcgctataggattagtggatagtgtacaaaccgttacaagtactgttcagttgttgacaagtcaacatttaaataatgatattgcgatcaagatgtcattagaagatggaacaagcgtagaaggtgtactacagtcttatgatactgaaaagaaggcctatcgtgtttcattatttgataatgatgcgattgtcacaaaaggacaaaaagtagctacaagtggtaagggtggaaattatccgagtggaatcttaattggagaagtaaaagatgtgtctttaaacgatgattcgattatttcaacggtctatgtttcgccagtatcgaatatgaaaagttttgactattgtcttgtgattggaaaagaggagagtaaatga

SEQ ID NO: 2604 - DNA, 792 bp, Holdemanella biformis
aaatgcaagcttagagattttaaaggttattggcgtatgagaaaactaaaaataggtagaattttaactctttttgttgtcttaattcttgtggtgacagctagtgtatattgtattcgaacattttttcgacaagatgagataatagaagaaaaaagttattacgatttagatttattttctatggaaaatggttggatgacctataaagattcttcttataagtctttaacaggaattgatgtttcaagccataatcagtatattgactggtattctgtaaaacaggatggaattgattttgcgataatcagagttggctatcgtggtgctcaagaaggaatcttacatgaagatgcatattttaatacgaatatgcaagcggcaattcagaataaaatcaaagttggagcgtattttttctcgagcgctattacagaagatgaaattgatgaagaagtgaatatggtattaaatgagattcgaaattataaaattgatatgcctattgtctttgatatggaagaatttgaaaaaggtggaagaatagataatctgacacaagagcagcgaacaaatttggcacttcgattttgtggtaaaatcaaaaaggctggatatgatcctatgatttatggaaatatgacttggctttatcaaaattacgattttgaaaagatatccaagtatccaatatggttagcgtcttattcttcagattgtccaatggaggataagtttgaaatgtggcaatattcaaatattggccaagtgaatggggtagaaggagat

SEQ ID NO: 2605 - DNA, 1197 bp, Holdemanella biformis
atggcagtagaaaagagattaatgtattatgcatcatttgacacacagtcaagtgaagaaagtacaagtgcaccgagtactgaaaaacagttggtgttagctcgtgaattaaaaaaagaatgtgaatcattaggttttgattctgttgaattaacggatacaggaatcgtatatgcttacttaaatgcgaatacagataaaaagatggatcgtattggctttattgcgcatatggatacggctagtgaaattacgggtgcgaatgtgaagtgtcgtgtgatttcaaagtatgatggaaatacaattcaattaaatgaagagtattcaatgtgtaaagaagaatttccagctttggcaaactgtattggtgatgatttgatagttacagatgggacgactttacttggtgctgatgataaagcaggaattgcgattattttagaggctatggaacagttgattcaatctgaaaaggaacatggatttattgcggttgcctttacaccagatgaagaagttggtcgtggtgttgaaaactttgaattagataagtttgccgtggattatgcgtttacaattgatggagatcgtattgattctgttgattatgaaacatttaatgcagcacaggctgttgttacatttgatggaacgagtattcatcctggggatgcaaaagatcgtatggtcaatgcaagtttattagctatggaatatgcttcaagtcttccaaagaaacaaacaccttcacatacacaaggtcgtcaaggtttctatcatttagtggggatggaaggaatttgtgaagatgcaaaattaacttacattcttcgtaatcacagtaaacagagttttattgcacaaaaacagaagatggaagcaattgcggataagatgaatgaaaagtatgggaatcgtgttcatgtaacgattcgtgatcaatatgaaaatatgcgtcaatatatgcatggagatatgcgtagtgtgaataaggcaaaatatgctttgcgtcaatgtgatgttactcctgttagtacgccaattcgtggtggaaccgatggggctatgttgacggctagaggacttatttgtcctaacttaggtacaggttcttttaatcatcatggtcgttttgaattcgcaagcattcaaaagatggaaaagatggttgaaattgtattaaaaattgttgagtag

SEQ ID NO: 2606 - DNA, 729 bp, Holdemanella biformis
atggaaagactacaaaaagtaattgcccaagcgggtatttgttcaagaagaaaagcagaagaattgattttagatggaaaagtcaaagtgaatggtgaaatttgtgatgtattaggtacaaaagtatcaaaacaagatatcatcgaagtcaatggtaatatgatttcgaaagaagaaaaagtctattacatcatgaataaacctaagggttgtctatgtacaagtagtgatgataagggaagaaaaatggtactagactacatgcctaaaaatgaaagaatcttctctgtaggacgtttggattatgacacaagcggtgttttattattgacaaatgatggcgaattttgtaaccatatgattcatcctcgttatcatttagaaaaaacctatgttgttaatcttcaaggtatcttgagtgaagatgatatcaaacaattaagaaaaggtttaaagacaaaaacagaaaaatatcagccggctaaagtatttgtgcttcaaaaagatttaacgcgtaatcgtacgcagtttgagcttacaatttctgaaggtaaaaatcatcaggtaaagaatatgatgttggcattaggccatgaagttcgtcgtttgcacagagtaaaatttgcgtttttagatgttaaagatttaagagcgggtgaatatcgtcgtttaaaaccttatgaaatcaaacaattaaatcgtttggctatggaaggcgaaaacaagtaa

SEQ ID NO: 2607 - DNA, 1020 bp, Holdemanella biformis
atgacaacaataacagtttttaaaggagatggaatcggaccagaaatcacggatgccgtcattaaagttttaaatgctgcaaacgcaaagcttgaatatgaagtgtttaatgtaggtgcaaaagtatatgaggaaactggggaatatattcctgaaaaagcttttgaatcttatgaaaagaacaaaattttattaaaatcacctatcacaacaccggttggtaaaggatttcgttctttaaatgttacattgcgaaacaaatatgatttatgggcaaatattcgtcctgctaaatccaatccttgtattcctacaaaatttgacaatgtagatatcgtaacttttagagaaaacacagaagatctatatgttggtaaagaagagcagattgatgaaaatacagtttatgcctataagatcatcacaaaaaaagcaagtacaagaattattagagctgcttttgaatattgtattaagaataatcgtaaaaaattaacttgtgtgcataaggctaatattttaaaaatgagcgacggcttatttcttcatatttttgaagatattgccaaagaatatcctcaaattgaatccaattccttaattgtggataacacttgcatgcagcttgtgatgcatcccgaacaatttgatgttatggttatgccaaatctttatggagatattgtttctgatttaacgagtggtttaactggcggattaggtttacttccaagttgcaataaaggtgatgattatgccatgtatgaagctgtgcatggtagtgctccagatattgcaggaaaacatattgcgaatccgagcgctttattattatcggcttgtatgatgttagaggatcttcatcaggaaagtgtggccacaaaaattcgaaatgcattaaacaaaacatttgaagaaagaaaggtattaacttttgatcttggcggaagtgcttctacagatgcattcacggatgaaattattaaaaatttagaggcatcatcaacaagtgtgggtaga

SEQ ID NO: 2608 - DNA, 1035 bp, Holdemanella biformis
tgccgcgaaagtgagagtgaaataatgcaaggatataaaacacatgtacagtcagggattttgttgaatgccaatgaagcaagtaaaaatgtgaatgaaacagttaaacaagaaattatagatgcgatttcaaatctatccttaaatcggtatccagatacaacttgccaccaattacatcgtttatatgcagaggttatgaatgttccgtcttcttggatcttatctggaaatgggtcggatcaaatgttaggatttttaattcaatattatttacaggaaaataaaatactttatactttgagtccagacttctctatgtatgactattatgtagggttgaatcattcaaagattgaaaaatatgaaacaaatcaagatggttcatttgatgttgaagcgtttatttcaaatggaaaagataaaaatgtagatatggttttattttcaaatccaaataatccgacaggacattccatcgcgttaagtgaaatgaaaaagattagtgaagcgtttaaggatattcctgttatctttgatgaggcttatatggagtttggtaaagaaagtgcagtttgtttattgaaagagcatccaaatgtatttgtatgtcgaacattatccaaagcatatggtcttgcagggattcgttgtggctttatgatttcttcacaagttgaaaagttaagtgcactctttattccttatgccttaagtagtgtgacacaaactatcgcaagtgttgtcttaagacatgcagatgagtataaggatactattgcgacaattatttcagaaagagaaagaatgtatcaagaagtaaaggaatttaagcaactgacaatgtatccttccaatgcgaatttcttatttggaagaagtgaaaaaaaggatttgttgcttgcgatgtttaaagaaaagaatatcacgattcgaaattatgaagatgcaagttttcgtataacgattggtacaaaagaagaaaatgaaatggtattagatgttctaaggagatttgagtatgcgaatagctga

SEQ ID NO: 2609 - DNA, 567 bp, Holdemanella biformis
atgataaataaagaacgttgctcatttattttcttattaattttagcaatacttgatcaaatgaatgcatctttattcagtgtggattttacatattcttccctatcttttgtcagtcatttatgtttttgtggatgcatacttgttgtgagtcatgaaaaaagcttgaatcgacttttatatgcatgcctatgcggcctttgtgtaggattgttctttacttcggattggttttttaaaatgattctatttggcctttttggatggctatcgggactatttaaaaatgcaatggatcaagatcactgggtacaatttgctcttgtctttttaatgatgtttataaatgatttaatttgttttttgggggcaaaattatttggatatcttacaatgagctttgtgaaatggtttattcacgttgaagcacttacattaatatttaatggggcttggatatttgtattgctctatattattacggtattcaatcgatatgcaactataaaaaatattcgtcttaaacgaatggaaaagttgcatatgcaaaatattcgaaggaaatga

SEQ ID NO: 2610 - DNA, 1767 bp, Holdemanella biformis
atgagctggattagcgaagaggatataaaggcaatacatcaacaagccgatattgttgacgtaatgtctcactatatcacacttgaaaaacaaggcaaaaattataaagccatatgtccttttcatgatgatcatgatccaagcttatcgatttcgacggataaacaaatattcaaatgttttgtgtgcaatacaggtgggaatgtatttacttttgttcaaaagatcgaaaatatttcttttctagaagctgtatgtaaggttgctgaatggattcattatcctttacatttggatacatctaaatttcaaccgaaagtcgatgaaaatcaacctttatttgattgtatacaatcgtatattcgttttttgacatttgaactcgaaagtgaaaatggagaaagcgtaaaaaggtatttaagtcaacgaaaaataaatgaagatattataaaaagatttgaaattgggtatgcacctgaatcgagtcgtagtgtgaagtatctcaaggcaaaaggttttaacgaacaaatactattagacacaggattaattcgtactcatgacttgaacacctatgccgtatttgatcatcgattaatgattccaatccatgatgaacatggaaatccagttggttttacggcaagacgattaaatgaagataaagatatcgcaaagtatatcaatacttcagaaacaaagatctatcacaaaggaaatttaatatttaattatcatagggcgaaagagtttgcgaaaaagaataagcgatgcatattagttgagggggctatggatgtcattgcctttgaaaaggcggatattcatgaaagtattgcttgtttaggtacagcttgtaccaaggaacaaatgacattattaaaacgtttaaatgtaccactagtggtatgttatgatggggatagagctggtaaggcagccacttataaatttggaaagctagccgtcgattatggcttgaacttttccattgtgaaaaatacaacgggtaaggatccggatgaaatttttaatgaacttggtaaagatgaattgtatttatccgttcataaaaccgtgtcgtttgttgaatttttattcgaatatttaccaaatcaatatgatttagacaactacgaggataagaaaaaattcacttctgaaatgcaagcttttattgaaagaacatgcacagattttgaaaaggccgattactattctcgtattcgagatttaactggatttgatctatcgaattctgcaagtgctgttgcacaaataaaagaaccaagaaataaaccatctgttattcgaaatatggagccattaaaaaatggaagaacacttgccgagtatggtgtgttatggatgattcttaaaagtaaattagcggccgaccaatttaaagatcagattggcttttttcaagatccaatctgcgaagaattgtcattatattgttatgacatgtatcgaaatatggaccatatcgattttgatgttttaatgagttatatcgaaaaagaagaggttcgtaatttattggtaagcctaatggaaaatccgtttcatgtttatgaatataatgaagacttctttaacgatagtttaatgaagatcaaagaatgtactttacaagaccaaatcgatcagatcaataatcagatcaagaatgttcaagatccgatgattaaaattagtttggcgagtaaaaaacaggaattaattattcaaagaaacgaaatcaaccatcgaaaggaaggataa

SEQ ID NO: 2611 - DNA, 1341 bp, Holdemanella biformis
cattttattatgaaattatataatagttattctcaaacaattgaagaattaaaacccatcgaagaaggtaagatttctatgtatgtatgtggacctacagtatacaattatccacatattggaaatgcacgtcctatcgttgtatttgatacattaaaaaaagcattgtctgcacaaggctatgaagtgacttttgcttcaaattatacagatgtagatgataagatcatcaaaacggcaattgaacaaaacgtgtctgaaaaagaaattacagataaattcattgttgcctacaatgatgtacgaagaggactacatgcagatcttcccgattatgcaccacgtgtaacagaaactatggatcgaattattgagttcattgataagatggttaaaaatggttcagcttatcaagttggaggcgatgtttatttccgagttaatagtgataaaaaatatggagaactatctcatcaaagtattgatgatttaatggtaggagctcgtattgatgaaaatgaaaagaaagaaaatccattagattttactttatggaaagagacaacagaaggtattaaatgggattcaccttggtcaaaaggacgtccaggctggcatacagaatgtgttgtaatgattcaggatgtattcaagaaaacattgattgatattcatggtggtggattggatttaaaattccctcatcatgaaaatgaaattgcccaatgtgaagtatgcaacgatacgcacttggcaaatatctgggtacacaatggtatgattaacattaatggtatcaagatgtctaaatctttaggaaatgtatggtgggctaaagatttgattgccaaccacggaggtaatttaactcgttggttaatgatttctacacattatcgtgcaccattaaatttaaacgaagaagcttttacaacttcaaagaaggaactagacaagattgcggcagcttataaacaagcttgtgtaaaattagctttattagatggaaaagaaacatccgcatttgatgaaacgtatacttcatttattgatgcattaaatgatgatttaaatacgccaaatgcgataagtgttgtatatgaattggttaagaaaatcaatcaggccgtacgtcaaagagaaatcgatgttgaaaatttagctgttttagtacatacattagaaaaaatgctttatattttaggtattgaatttgataaagtttcaatgactaacgaagacaaagagatgtatcaaaactggagaagtgctgtaaaagaaaaagatttcaaaacagcggatacacttcgtcaaacattgattgaaaaaggaattctgtaa

SEQ ID NO: 2612 - DNA, 624 bp, Holdemanella biformis
ataggagaaattatggaaaagaaaattaagttagtatgtcctgaatgtaataaggaatttaatacagacatttatacttcaatcaatgtgcaattggacaaagatatgaagacaaagatactgagtggaaagctttttgacatagaatgcgaacattgtcattctaagtttcatataccatatcctgttttatatcacgatatggaaaagaagcttttaattcagtataccgaagaaaaagacttaaaatcgagcgaaatcgctttaaaaaatgccaatgtagatgcagattatacagtgcgtatagtcgataatgaacgagactggattgaaaaaattttgatttcagatagtggatttgatgatcgcattatggaattgtacaagcttttaatactttcacaatatgaagatgctgaaaatgtgaatggtttatattattggaatattcaaacattagaaaatcctcattacgtaatggtgttggatgaaaaggaaagtgataaaatgcattttatgccattccatgaaggtgtatataaacaagtagaagaagtattcttatccgatattcaacaagactatattattgatgcgaactgggcaatttcgaatacaaagtag

SEQ ID NO: 2613 - DNA, 840 bp, Holdemanella biformis
atgatctatttaggaagtcatgtttcttttaagagtcctaactactttaaaggagccattgaagaagctttatcttatggagctaatgcctgtatgatctatacaggaccgcctagtaatacgcgtcgagtggatgtatcaaaattaaagatggaagaagctaaaaaaataatggctgaacatgatttttcaatcgatcgtgttattgtacatgcaccctacattatcaatttggccaatgctctaaaacctgaaacggctttgtttgggcacgactttttaaaggcagaattagaaagagtttctaaaattggcgctaaaacactagtgcttcatccaggaagccatgtaggcgctggaatggatattggtattgaatggatcatcaatggtttaaatgaagtcttagatcatgatacaagtgatgtcaagattgcgcttgaaacaatggccggaaaaggcaatgaatgtggttttacatttgaacaacttcaaaaaatttatttagggattcataaaaaaagccgcattggtttttgtatggatacatgccatatttgggatgcgggttatgatatcactcactttgatgaagtcctcaatcaatttgattcaattttaggcttagaaaatctattatgtatgcatatcaatgattctaaaaatgaattgggtgcccataaagatcgtcatgaaaatataggtaaaggctacattggctttgatgtattgtacgctatcgtgcatcatccaaagttagaacatgtcacaaaaatattagagactccatttgtggatggaaaagcttgttataaagaagaaatctcagcactgcgctga

SEQ ID NO: 2614 - DNA, 1056 bp, Holdemanella biformis
atggatgttgttgagattttaaaaaaagctataaaagaaaatgcatcagatattttctttgttgctggaagtccttgtatgttgaaggtaggacaacagcttgttgcgataacacaagaaaaaatgatgccgaatgatacgaaaaatattgttcaacagttgtatggttttgcaccttattgttcatatgagaattttgaaaaaaatggggaagatgatttttcgttttcgttatcacaagtaggccgatttagggtcaatgtatatcgccaaagaaattcagaagccgctgttttgcgtgtagttaaatttgaacttccaaaaccagaagattttcatataccagaatctattttaagtctttcaaatcgtagaaaaggaattattttagtaagtggtcctgctggaagtggaaagagtacaactttagcttgcttgattgatcgaatgaatgaaactagaaattgccatattattacgattgaagatccaattgaatttttgcattcgcataagaaatcgattgtttcacaacgcgaagtgtatcatgatacaaagaattatttaacggcattaaaatcggctttgcgtgaagcacctgaaattattttattaggagaaatgcgtgatgaagaaacggtttctacagcactttctgctgcggaaacaggacatttaattttatccacattacatacagttggtgcagtaaatacaatagatcgtattgtagatatgtttcagggacatcaagaccaagttcgtagtcaattgtccatgatcttagaggcggttataagtgaacaattgattcctacaatcgatggagaattaattccagtatttgaaattatgcaagtaaatccggctattcgatctcagattcgtgaaaataagattcatcaaattgaaaatacaatggcatccaatcgacaaaatggtatggttatgatggatgattcaatttttgaattgtatcaacagaataaaatttcaaaagatattgcgattcaatatagtttacatccggatcgtatgaaaagtagagtgcaataa

SEQ ID NO: 2615 - DNA, 939 bp, Holdemanella biformis
atggctttgcttgataagtggattgccctggatattggggcgtatcttgcacgattttatgatttttctacacagaaagaaatagttttgaaaacgataatcgcacaaaagggatctgaagttcttggtgtatccgatcaggcaattgcttatttatataaggatttagatacgattcaaattcagtatccaatttctcatggtcaaattcttcattcgattgagcctttgattcatgaaggacttgataagcttcatgcttttgatggtttattaagacctagcgtacttgtcagtgttccaagtgaattgtcacaaagacaacgtgagctttggcagcaggcatttttaaattgtggagtacgtaaggttgaatttatttcaaatttagaagttttacaagaagaaaatccttgttttttagttcatagtgggcattcgtatacggaaattcatatatgtgcttatgataaggtgcttgtatctaaaacgatttattatgctggagcacaagtagacgaacaaattcaaaggatcgtttatatgaagacgggttattttatcacaaaaatggatgcggcacatttaaaggaaatggcaagtgatgcattttggcagcagaaaaatactttgttgatgtgctatggttttgattcaaggcaaaacctacatccaattcagattgaatcaagtatagtatggcctgccattgaaatggtttcatcgcaaatttctttgtgggttaagcattgttttgatactcttccagcttctttacaggaatattttttaatgcatggaattgaattgagtgggggcatggcagattgttttggcccttcgcaatttatttctcagaatatttcgtgtccagttctttgtacaaaacgtggacaatacgatatgatagatgcattaaagggggtaaagtcagcgtga

SEQ ID NO: 2616 - DNA, 1077 bp, Holdemanella biformis
atgcttttagggggaaaaacaatgagtaaattacgtttaggtgtcgtatttgggggacaaagtagtgaatattctgtttcattacattctgtcacttcctttttacgtcaaattcatgcagacaactatgaaatgactttaattggtattaataaaaatggacatttctatttatataatggagatgtggattctattgaacatgatacatgggaaaatgaagaaacttgtgtatcttgtgcatgggtaaacgggggaatcatgccattagatggttcaaataaagtgattgaactagactgtgtattcccggtactgcatggtaaaaatggtgaggatggattgattcaaggtttacttgaattgatgaatattcattatgtaggttgtgatgttatgtcaagtgctatgtcaatggataaagaaattatgcatattttgtgtaaagaagcaaaaattccttgcgctgactacatttgtttatatgccaatcgagaaaatcctacatttgagcaaattcaagaaaagattgaattgccatggatcattaaaccatgtaatgcaggaagtagctatggtgtgcattttgtcaacaacaaagaagaatttgaaagtgcatgtaaagatgcattcttctatgatggtagaggtaagatcttggtcgaaaaagtaattaagggctttgagattggttgtgccgttatgggaaatgaagaaatctttacaggatctattgatgaaattgaaattacaggtggattcttcgattttgaaggaaaatatgaaatgaaaggagccgctatttattgtccggctcgtattgatgaaaaaacatttaaagaagcgcaagaattagctcgcaaaacatatattgcgatgaattgctgcggaatggcacgtgtagatatgtttgtgacagaagataaagaagtaatcttgaatgaattgaatacaattcctggattaacagcgacttctcgttatccttctatgatgaaagaagccggtattgaatttgcggatttaattgataagctaattgaactagctatgcaaaggacaattggagcatgctag

SEQ ID NO: 2617 - DNA, 720 bp, Holdemanella biformis
agcaatattatgtataaacgtgttttattaaaattaagtggtgaagcattatctagtcctgaagctgcttttgatccagaaatcttaaagagattagcaaaagaattaaaagaagttcaaaaattgggagtagaacttgcaatcgttgtcggtggtggcaacttcattcgtggtaaaatgatggctgaaatgggaatgaatcgcgctcaagctgattatatgggtatgttaggtacagtaatcaatgcattagcagttcaaaatgctttagaacaagaaggtgtgcaaacacgtgttcaaacagctgttgaaatgcaaaaagttgctgaaccattcattttaagacgtgcattgcgtcacttagaaaaaggaagaatcgttatttttggagctggaacaggttctccatacttctcaacagatacaaccgctgcattacgtgcttctgaaattaatgcagatgttatcttaatggcaaaaaatggtgttgatggtgtatatgattcggatcctaaaaagaatccgaacgcgaaaaaatatgatacactcaattatatggacgtactaaatgaaggtttacaagtcatggattcaacagctattagtatgtgtatggataatgatattgatttagttgtattcaatatgaatgaaccaggaaatattgttaaggctgttcgccgtgaagtaaatggtactacaatcactaaaaagaaataa

SEQ ID NO: 2618 - DNA, 789 bp, Holdemanella biformis
gtggagcaaaaaaatatgcttaatcgattcgatgttcataatagtgaaactttaaatattcaaattgatcgtcatgatcaaaaatcttatttgattgaattaagcaaagattgcacaaaattagatttaagagtggaatgtttagaaaattctttttcaaaattctttattctaaatcatgctgaaaatgcatgtgaattaaatattaatatggtacttaaacaagatgccaattgccagatgggtgtcttggatttagaaaaaagcccgctaaaatggaatcattatgtagatcttcaagaaccgggtgcagaatatgaaattttaagtggtcaattgtgtcaggaacatatcgaaaaagtatgcgatatggaagtaagacataatgcaccgcatacaaatggtcaaatgaaaaattttgctgttctatttgatcatggtcaataccaaatggttgccaatggcaatatcaaaaaaggatgctttgatgcacaatctcatcaggcaacgcgtgtactaactttaggtcaaggacacaagacgaaagttattccattattattaattgatgaaaatgatgtaaaggcaagtcatgcccttacaattggtcagccagatgcagatcagttatattatttacagtctcgtggattaagtacaaaacaagctgttggcttattaagtgtaggttacttcttacctgtcattgatttagtagaagatgaagaattaaagaacagtcttcgtcaagaaatggaaagtaaggttggattgtatggacatcagtaa

SEQ ID NO: 2619 - DNA, 903 bp, Holdemanella biformis
atgacgctacaacaattgcgctacgtgatccaggtcgttgaatctggatcttttaattccgcagccaaagccttatttatttcacaaccatctctttcgaaatccattcatgatttagaagaagaaatgtccatctgtttatttgttcgcacaaacaaaggtattttactttctgaacaaggtgaaaaatttttaggatatgctagacaagtcgttgaacaagcaaacttacttgaagaacaatataaaaatgccgttcctgcaagaactgtatttgcgatatcaagtcaacattatgcctttgtggtcaatgcctttgttgccctagtcaaagagtataatcaaagtgaatatgaattttctttaagagaacaaagaacatacgatattattgatgatgttaaaaatcatcgcagtcaattgggtattctttatctttcccattttaatcgtgaagttattcaaagtattttaaagaaagaacatttaacattcacaaaactatttgaggctagacctcatgtctttgtatctaagacaaatcctttatccaataaaaaattagtgaaaatggaagatttagaaaactatcctcgtttaacttatgaacaaggaaccaacaattcattttacttttcagaagaattacacagtacgcaaccatctaaaaagagtattgttgtttccgatcgtgctaccttatttaatttattgattggacttgacggatatacgatttcttcaggtatcttaagcacggatttaaatggaaacaatattgtatccattccactagatagtgatgaagtcatggaaataggctatatcagtgatggagtcttatccaacatggcaagaaactatctaaatcatctaatacaatatattgaacagaccaagtaa

SEQ ID NO: 2620 - DNA, 1635 bp, Holdemanella biformis
gtgattgaacaattgtcagtaaaagattatgtattattcgaatcttgtatcatagattttacaaatggaatgagtgtgattacaggtgaaacaggtgccggtaaatcgttattgattgatgcgattggatatttgagtggggatcgcattaaatccaatgtgattcgtaatggaaaagataaggccatattatctatggttttaacttcgaatgaaaaagtaaattcgatcttagaagagaatggctttgaagtggatgatcaagtgattatttcgcgtacaattttaaataataataaaagtactgtacggatcaaccaacagatcacaactctttcttttgtgcgtaaaatcgtcaatttattagtggatgttcattcacaaatggatacatatcgtttaatggatacaaaacttcaaatggaattattggatagttatgccaaggtagaggatttaaaatcatctgtaaaagaggcttatttttcatattcaaatgttttaaatgaattagaaacattaaaaaatgaagaattttcagattcggaattggagtttttaactgcacagctagatgaaattgaaaatgcgaatatacaagaagatgaattggagtcgttgaacgaacagattcatgaagcttcaaactggtttaaaaataaagaagatctttctatgtgtttatatgagatggataaagaaaatggtgcgttagattctttgtatacgttatataaacaagcttcaaaatcatcaatactaaatgcatatgaagaaacatttaaaaatttatattattctttacaaagtgtagatgaagaacttaagcatattcgtgatacacattcaaatgacgctttagatttggatagtcttcaaaatcgtcaatatttaatcaaaaaattgtatcgtaagtatggtggttcctatatgtctttaatggaatctaaaaagaatatcatggataaaattgatcgaatcattcatcgtcaggatgtgtttgataagttggaaaaagaaaaagcagaatcttttgcggcttatatgaagttcgcaaaagaattatcattaaaaagaaaagctgtcttttctgaattagaatccaaagtaatggaacattgtaaagatttgatgttagaaaatgctcgatttaaaatttcttgtaccgaaaagaagccatcttcaaatggtattgatgaaattgaatttttagtgtcaatgaatcctggccaggatttttcaagtttaagtgtatctgccagcggtggtgaactatctcgtttgatgttggcattaaaggttgtatttcaggcatcaaatggaattgaaaccattatttttgatgaaattgatacaggtgtcagtggtaaagtagctttggcaatgggggctaaaatgaaggctttatccaacaagtatcaagtattatgtattacgcatttagcgagtgttgccgtaatggcaaatacgcattatttagtaagtaaaaaatcgacttttaatgaaacaatcacgcgtgttcaaaaactagatcatgaccaaacgattcaagagttagctatcatgacaagtggtgaagcgagtgtaaaggcaaaagaatctatgcaagatctatgggtgaagattcatggctag

SEQ ID NO: 2621 - DNA, 549 bp, Holdemanella biformis
aattttatcatgtcagaaaaaagcaagagatcttttatccgtgatggattatataacataaatcgaacaatgcagcttgatcctgcagcccattctaaatgggaagtgttttggctatatccgcacatcaaagcgattggcttgcaccgaatggcccattggttttgggtgcacaatcatacatttattgcccgttgggtaagtaatcgagcaaggcattggacgggtattgaaattcatcctggtgctgtgattggtcgtggattgatgattgatcatggtatgggtgttgtgattggtgaaacggcaattattggtgatgattgtcagctttatcatggcgttacactaggtggaacaggtaagcaacatgtaaaaagacatcctactttagaggatggtgtatatattggttgtggggccaaatgtttaggaaatatcactttaaaaaaaggttgtcgtataggggccaatgcggtacttttaaaagatgtacctgaaggtgcaacagccgtaggtattcctgcaagaattatagagaagaaatag

SEQ ID NO: 2622 - DNA, 1200 bp, Holdemanella biformis
atgaactatattcaaacgcaaaaatttagcgatgtctatgtttcttgtaaaacaatgatgccttttaatcgaaatacaattacagcactcaatgttcttgtatatatgatgaaggcaaaaacagaaaagatggattcaaaacagaaattagcctctacgttaaatctagcttatggtacgaaaatatcttatggattaacatctttcggggatttaattcaagtggatgtgcgttttcaatttgttcgtccagactggattgaagatgagaattatgtaaataaaatcaaagatattatggatcaagctttatttcattcggtattggatgaagaaaacttcaaagagtctgtatatttattgaaaaataggttattagcacaaatggatgatccagccaatttatcctgtatgtatgcctttgaaatggctcatgacaagcattcgatttcgattcctgtacaaggaagtttaaaggacttagaaacgcttactttaaaagatgtcaaacaaatatatacactctatatggatatggctaaacatttctatatttgtggatatgttgatcaagaattatatgattttattgattctttggattcgcattgtccttttatttcagaaagaacattgcttccaaaagtagaaacgagttataagacatttgaaaaggatatttctcaaacctgtatttcgcaagtgtattctacaggtgtggatatttcaagtgcagactatgaggcagaattgcttttgtgtagtattttaggacaaagtcaaaagaatttgatgtttgatgagattcgtgagaagaatagcctttgttattcaataagctcatcaatcattcgttttgatggtgcaatattgattcatacgggtgtaaatcgtaaagatgttactaaagtattgaatttaatagaaacccaaatggatcgattattgaatatggattatgacgatgcctatttagaaattgcgaaaatgggatttaaagatcgccttgttggcgggttggatcaggcactctctttaattgcccaagcgtttttagatgatttgttgcatcgtaaactaacaacagaacaaagaattgaaaggattatgaaggtgacaaaggaagatatttcgcgtgttgctttacaaatgaatttggcatcagtagccattgttgcggagaatgaaaatgaattataa

SEQ ID NO: 2623 - DNA, 747 bp, Holdemanella biformis
atgatttatataactggcgacattcatagagaacaagatattcataaaatcaatcctagagagtttactgttggcgatactttaacggaaaatgattatgttattatttgtggtgattttggttgtgtctgggatggaagtacaggagataacttttggttgaaatggttagattcgcttccttggaatactttatttattgatgggaatcatgaaaactttgatgtcttaaatacatatcctatagaagaatataagggtggtaaagtccatcgtattcgttctaaagtatttcatttgatgcgtggtgaagtttttgatatagatggttataaattctttacaatgggtggaggattttcgcatgatgtatgttatcgtacagaacataaaaattggtggaaagatgagatttgtacgatagaagaggcaaaacacgcatttgatacattggaaaaaaatgagtggaaagtagattatattttatctcatgacatatattcatctcatccattggctcataaatatgaaatagatatgagtttatatggagataattattatgatttacatgattgtttagaaacgattgaaaagaaaacggaatataaaatgtggtttagtggacattatcatgatgatttaattcactattcagattcacaaaaaccttgtttgactttatttgataaagtgatgttgttagaaactataaatgaagaaatgaaaagcctgactaaaatttag

SEQ ID NO: 2624 - DNA, 900 bp, Holdemanella biformis
atgaaagggttaagaacttttttatatgaacttaaatatgcctttttacaaatgaaaagacatatcatgttatgtttttccgccattagcgcaattggtattacgttattattaattggagctgttctaattataggactgcatgtgaattatttttcgaatgacgtacaaaaagatttaagcattcatgtcatattaaatgaggatataaaggatgaagcttctatgcaagatataaatgataaaatctccaaattaaaaaatgtggataaagttgaattttcatccaaagacaatgaattggaattgatgatcaaagaaaaaggttcggcttttaaagcatatagaggagattcgaatcctttgtcaaatgcgttctttgtttatctaaaggatgcttctaacattcgtaaaacaagtgcacaaatcaagaaaatcgatggcgtagcgagtacagcttttggtggagatagtgtcacttctttagttgaaatgttgaatatgattcaaaaaattggtttgggccttgttgcattgttggtcatattatccttatatttgatctataatacgattcgcacaacaattgattcaaggcaagatgaaatcatgatcatgcgaactgtaggtgctacaaatggctttattagtaatccgtttattgtagaaggaatcttaattggattacttggagctgtaattccgtatttaattgttcattttggatatgaaaagctatatacaagtctaggtggacaattatttacaccgatgtttgccatgtttaaaccaaacacaatccgttttcaagtaggattctctatcattcttgcgggtgttttgattggtggctttgcctctttgcttgcggcaagaaaatatttaaaaatgaaacgataa

SEQ ID NO: 2625 - DNA, 756 bp, Holdemanella biformis
atgaatgaaatgtcacaacttaatttttcaattggaacattttctcaatgcatgagtttttcacctcaaaatatacaaatcgataattttgaagactgtacactctattgtattgactgtgaaaatgtccaacaattcgatattaatacactgaacgccacaagtcctagcgttttctttttctttggaaactttgaaaaaataggacaaaaagcatggcaacaaatttttgcgattgccaaagattttcctaattcctattgtttcaatacacaccaaagtcaaaagaattttgcggacatctattgtgctacacttcttggtcaagttgtcgccaatgttatacctaaaaaaattcttcttgtcacaaatgatcaaggatttcatggtattaaacaagctttaatgtttcaaggtaaagacatcgacatcgaaattttacaaacaagagacccattcttattgccattaaaagaagaacagccaaaacaagttcaaaaagcaaaaaaacaacagccacaaacaaatcaaaagccaaatgaggcgagtgatgaagaggttttagaagttttaaaaaagtatcctaaaatcaatacacgctatgcatcgattgatgatttaagcaaatatctaatgcctatcttagcgaataaacaaaagaagtgtaaactttcaaaatggatcgaaagtgattacgcaaaaaaagtaggtcgatataaaaaggattcgaaaggaaaatattataaattaaaatga

SEQ ID NO: 2626 - DNA, 771 bp, Holdemanella biformis
atgactcaactttcaagaaaacaaaagtatcaagaacttagagatcgtttagatgaagaaacaactgcagctcaagcgcagccagtaaaactacaaagactatcacgtgtggatagtggttcacatgccaataagccattgtatccacatgatacggtgtgtgtttctccaactgtaaaagaaatgcctacttctccagttatggaagatcttcttggggaagtgaaacaatacaatattgataatggaaatcgtattacagatgatacgcagatcaatattttaaaacaattggattcaacgagtgaaacaagaaaaagaaatcaacatgtgattccaatggaaacagatgatgaagatttaggttcgacaatgaagatttcaaaacctacaacgcaagagtttgaaagacctgttcgtcaagaaccaaaggaagaaaaaattgtcttaacaagtgatgatgtagaagatgtcaaaaaacctgtggatgacaatttggatttaatgttcttatctggtgatgattttgataaaacagaagaacaacaaaaaaatgaaaagaagaaaaagtcaaagcgtaaaaaagaaaaacgtgatgaacttgaatctatgcctagtgcaaaaatgcgcatgaaaacttcggattttgaaaaagcaagtaaaaaagggaagaagggttcagaaatcgtattaaatgtcgtattaggtatattgattattgccttagttgcgattattggttatttggtttggacatttaagaatatttaa

SEQ ID NO: 2627 - DNA, 1863 bp, Holdemanella biformis
atgagaaagattagtcaagtgtatgatattgaatcaccacgtcaaatcaaggatttgacaatcgatgagcttacacaattgtgtagtgatattcgagcttttttaattgattcaatctcaaaaacaggtggtcatttatcaagtaacttaggcattgttgaagtcacagtggctatgcactatgtctttgattcacctaaagataaaatgatttttgatgttggacatcaatgttacacacataaaatattaacaggaagatccacgcaatttgcgacattacgcaaaaaaggtggtctttcaggttaccaaaagcgtagtgaaagtaaatatgattgttgggaagctgggcattcttcaacctctttatcggctgcactcggctatgcgattgcacgcgatctaaaacaggaggattataatgtcattgcccttattggagatggttcattaacaggtggaatggcacttgaagcattaaatgatattggttctaaacaaaaaaagatggtcattatatttaatgataataatatgtcaatttctaagaattatagcggagttgaaaaacgtataacggatattcgtgcttcacatttatatattgatttaaaacatgatgtaaagaataacttaaaatcgaataaattaggtagtaatgtattaaacaaactgtctcattttagagacagaattaaatatgaagtgattgatgcacctttatttaaagagtttaatttagattatatgggacctgtggatggtcatgatattcaaagtttaattaaggtgtttgaagctgccaaagaacatgatggtcctattgtagttcatgtattaacacaaaagggtaagggttataaatatgcagagcaagataaagttggaaaatggcatggcgtaagtccttttgatgtggctacaggtaaatccttaagtcttcttccaccaaatgaaatttcttggtcccaagttatttctaatacggttatggatcttgccgaaaaagataaaacgattgttgcgattacaccggctatggcgcagggaagtaagttattagaatttcaaaaacgttttccagatcgtttctttgattgtggtattgcagaacaacatgccgtaacaatgtcttgtgcaatggcactaggtggtttaaaaccatttgtcagtatttattcttctttccttcaaagagcttatgatcaagtcaatcatgatatggctagaatgaatgttggcgttgtgattggaatcgatcgttgtggtttagttggagatgatggtgaaacccatcaaggtgtatttgatattgcgatgcttagaagtgttccgaatttgattttgtcacaaccaaaagatgctaaagaagctcaaaatatgatttatacagcttttgaatcaaaaaaaccattctgcattcgttatcctagaggaaatgcgttatatgccaaaaataaatcgtattcattaattccgattggttcttgggaaaaatttgtggttggaactccaacacaaattgtgattacatatggtccagacgttgatcatgtgatcaataaggcaagagaaaataaaatgggtttattggttgtcaatgcacgtttctttaagcctatagatgaagttatgatgaaagatttattaaagatggatctttcgattacagtatatgaaacagatgttaaaattggaggactttcaagtgctatattagaatttataaatacacttgatgaaaagattcatataataggtattgaggatcactatgtatgtcatggttcgattcgttctttgcgtattcaagaaggtattagcacagaatgtttatttgaggaattagagaaacatggataa

SEQ ID NO: 2628 - DNA, 861 bp, Holdemanella biformis
atggaaaataaaattgttcttgtgactggaatgtcaggtgcaggtaaatcaagtgctatgaatgccttggaagatttagggtattattgtatggataattttcctaaggaattactagataatttagaagaattattaagaaaagatgagacgcattataaaaatgtggcattaagtgtgagtgcaatagattatcaagcttttgtcagttattttgagaatataaatagagaactacaaattttatttttggattgtagtgatgaagaattgttgttgcgctatcgctttacaagaagacaacacccaatgattgtaaatcatttagctacgacattagaggatgcgattgaagttgaacgtgattttttggatcatctacaagaaaattcacagaataccattcatattgatacgacaaaattaagtacttcagctttagcaagtcgtgttttacatcgttttaaaagtgcaaaacgaagtgtatttacagtaacatttcaatcttttggatttaagcacggggtgccattagatgcagatatggttattgatgttcgtttcttacccaatccattctatgatcctttgttgagagaaaaaacaggaaatcaaaaagaagtttatgattatgttatgaataaaacagaaacacaggaatttattgttcatctaaaaaattattgtgattttgtatttaatcaatatgagaaacaaaataagtcacatatgattgttgcgataggttgtacaggtggacaacatcgttcggtttctatttgtaattggttatatgacacatataaagatacatatcgttgttttaaatcacatcgcgatattggagtggatgaagaatga

SEQ ID NO: 2629 - DNA, 747 bp, Holdemanella biformis
atgaaaatatcagtattaacattattcccagaatattttgaaccattaatgacgacaagtattcttaagcgtgccaaagaaaaagatttgtttgaatttgaaacgattgattttcgaaagtttacaaaagaaaaacatggtcatgtagatgacacgccttatggtggtggggctggaatggttttgatgtgccaaccaatattagatgcattagaatcgattcgtacagaaaatagtacagtcatcttattaacacctcaaggcaaaacgtttaatcaacaaatcgcaaaagaattatccttaaaggaacatttaatttttatatgtggacattatgaaggctttgatgaaagaattcgtgattatgtggatattcaaatgtctttaggtgactttgtcttaaccggtggagaaagtgcctgtatggttatgtgtgattgtatattacgtatcttacctggtgttattaggcaggattcaagtgatgatgattcattttcaaatgggcttttagaatatccacaatatactcgtcctgaagtatataatggaaaaagagttcctgatgtattattgagtggtcatcatgcgaatattaaaaaatatcgccatgaagaatctttgaaacgaactgccttatatcgtccggatttattagaaaatttagaattagataaagaagatcaaaaagtagttgataccgtgttaaaaagctcaattgtaaaactaaatcccattgagaaatag

SEQ ID NO: 2630 - DNA, 843 bp, Holdemanella biformis
atgaataaagaatttgaagattatctattagtacgtgtacaagaaaatgatgatagtcgtacaaaagatgcgatggcttattcattaatgaatggtggaaaaagagtacgtcctatgttgttgttttctgtactagaaggctatggaatggatgctcatgttggatatccttgtgcttgtgccattgaaatgattcatacttattcattagtacatgatgatcttccagctatggataacgatgatttgcgtcgtggtaaaccgagttgtcataaagcctatgatgaggcaacggctattcttgcaggggatggactacttaccaaagcttttgaagtcgtacttgatagtgaatgtagtgcgaaacaaaaagtggcattagttaaagcactttcttggtatgcaggtattgatggtatgatctatggtcaaacattagatttgcaggctgaaaatgatacaaatccaacatttgcccttttgcaagaaattgatcactataagacaagtaaattattaactttgcctttagtatgtggttgtattttagcgaataaatttgacgacattgaccatttccgtaagattggtcttgtgttagggttggaatttcagatgcaagatgatattttagatgttgttggtagtgaagaagtggttggaaaatcattgagtgatgaagataatcataaagtaacagctgtatctttattaggtcttgaaggagctaaggatatggttaaaagttatgatgaaaccattcgtaaatctttagataaagtcagttgtgatgtaacttcactaacaaaagtattggatactttattaaagcgtacatattaa

SEQ ID NO: 2631 - DNA, 897 bp, Holdemanella biformis
atgaaagaaaaacaggaacaaattgtaatgcgtatttctttttggtccggtgttgcatttgcacttgcagaattgattatggccatctattctaaatcccagtcggttctagcagataccgtttatgattcaactgaacttgttgttattggattaacaatttatattattcctttattttataaaccagtaaccgaaaagcatccctttggatatgcacaacttgaaagtatagtgatcttattaaaaggatttatgtttatagcggttatgatggttttgattatgaataatattcaaattatgttgaatggtggaaatgaaattgatcatatgcaggtttctatgtttgaaacgattttaacatgtttttccgcattgattttattcatacttatgcaaattaataaaaaggtgacatctcctacagtggatgtcgaaatttatggatggaaaattgatgtattctcaagtgttggtgtatcgctagcgtttttcttatcttcgtttttaacacatacgccacttgcttttatatcaccctattttgatcaaattgtggcaatcgtattggcattaggtatgatgaaagaacctattcaaatgattggagatagttttagaagcttaatgcttttaagtccagatgaagaagaagtcacaaaaataaaacatatttcttcatctatattaaataattatccctatgaccctgtcttctatgatatcacgacaacaggaagaaaaatgtggatatctatttactttactacacgagttgacacaatgtcttttacagaacttgaagtagccaatcgagaattaaaaattgctcttcaaaaagaatatgaagattgttttgtggaacttgttcccaatgttttagcgaataaatag

SEQ ID NO: 2632 - DNA, 756 bp, Holdemanella biformis
cttgtgaagcaggaagtgcagcaccatgtcgagaaagaccagaaaagttctttagttaggaggaacattatgattgatttaaaagatgtttcaaaagcatatcccaatggggtacatgctttaaatcatgtaaatttacatattgataaaggtgaatttgtgtatgtgattggagctactggttcaggaaagtcaacattgatcaaagtgttaaatggcgaaattgttccagatgaaggaactgttattgtaggtggagtcaatgtaggtgcattgaaacatagaaaagttccatactacagacgtaatgttgggtgtgtttttcaagattatcgtttattacctaagctaactgtttatgaaaatattgcgtttgctctagaagttgtgggtatgccacgtaaacaaattcgaaagcgtgtcatggaagtcttagatcttgtagacttgaaagaaaaagccagaagctatccagatgaattatctggtggacaacaacagcgtgtcacaattgggcgtgccatcgcaaataagccaatggttttgattgcggatgaaccgacaggaaatctagatccagaaaaaagtttagaaatcattaccttgcttgaaaaaatcaataaaaaacttgatacgacgattatgatggttacacatgataaagttttggtggatcgttttaaaaaacgtacgattatgctcgataaaggatatgtgattcacgattcaaatagaggtgggtataagagtctatga

SEQ ID NO: 2633 - DNA, 1059 bp, Holdemanella biformis
ttgcgtgaggtacttattttgattagtaaaaaagaaatgcgagcacgtgttttattgatcgtgatttgttttgcggtgggatgtttttgtctttaccatatggataagtcatatgatccgttagccaggtatccttatacgacggatgcaaatcgtgatatcattctagaatatttagatagtaatgatattgattatttgatcaatcagcatattacgccagataagtttatggattttattaagctagatggatttagtttaaaaaacacgttgtattataaagaggcaaaagatacgcaggatgcggataatgaatatattgtcaattttgtgaatcgtttccgtaagaatttttcgtatgattctttaaaggaattgttgtcgcactattcctatattgatttaacaacatattatgaaaatgaggctgtcctatattcggatttacgtttggtggcagatcctacaaatccatatgttgtcttaaaccaggaaaatacagtatataaatatgcaccagaaaatttagtggattttaatggtatatatgttcaaagtgctatggttgataacttatcgagtatgttagatagttatgcttcggttatggatggacaagatcatttgagtgtctcaagtggttacttgaattatgaacaagtcttagatcagtatgtcaatgcgtcaaaggaatttgcgggtgttgataattatatgtatggggctggaaagaatgagcagcaattagggtatacgattgttttagatggtcaaaatgaatggatagagctttgtaagcagcatctaaatgaagatatggactatacgcaagtcgaagaagaattgtctaaggaaaataaaaatcgtgtagaatggatattggaaaatgcgtatcgctatggttttgtggtgcgttatggaaaaggtcatgaaaagaagacgggacattggtatttgccatttgtacttcgatatgtgggtatagagaatgctaagatcttgcatgatggtgataagagtatggaacaaatgtcttttcaagatgaactgaattag

SEQ ID NO: 2634 - DNA, 1038 bp, Holdemanella biformis
atgactgatattttacgaaataactggtttgtcgtcctaattgccataattattattggttttattggctactttatttatgacacaaataaagacaatgtatccgcaaaatcatcaaataatgagcaagttgttgcttcaatcgataaagacgatattaccgcaaatgatttatatgacgaatccgcaccatatgatggttcaactatctacaatatgtataaaaatgccgtcatcgatcaatcaatcgaaactacaaaagatattaaaaaacaggcaaatacattggaatctaatattaaatcaaacgcatcaaaacaaagtgacgattatgaatccactttaacttcagaactagctaaatatggctattcatcctttgaacaattaaatgactattgcataacaagcgttaaagaaaaagaaatgaataaaaaatatatcacaaaacattttgatgaattaaaaaaagcctgggaagaaaaaagccctagaactgtttctatcattaaaatggaagtaagtgatgcagataatttaacagaaacagaaacaaaaaagaaaaataacattgataaagctttagaaaaagaaagttttgcggatgtcgcaaaagcattctctgaagattcaaataccgcaaacaaaaaaggttttgcaggatatgtagattcagattcaacaagctcagaaacaagctcagactcaagttcaacttctactgtacctgctgatgtagttacagctgccattaatcttaaaaaaggtgaaactagcgactggattacagttacaaattcaagtggcacaagcttatatagagtttatgtaaaagaaacagattcaaataaaatcttcaacgcaaaaaatgacacagtttcaaaccaagcattatatgcgatcttaaacagtgactcttctctttcatacaaaattctaaattcatacgcgaaaaaattagatattaaattcaacgataaagacactaagaaaaaatttgacaactatgtaaaaacgacttatggaggtgatcaataa

SEQ ID NO: 2635 - DNA, 1104 bp, Holdemanella biformis
atgaaatggaaaaaaaagaaagaaaggcgtatacttgagatatggaggatgactatgaacagaactcaaactcgtcaagttcaagtaaaaaatcttgaaattggacataataatcacgttattattcagtcaatgtgtaacattgaaacaaaaaaggcagatgaggtagccaaacaaattttaaaccttgaaaaaatgggctgcgaattaattcgtgtcagctgtatggatatggaggatgccaaagccataaaagatataaaaaaacaaattcatattccattagttgctgatgttcactttgattatcgtttagctttagcttgtattgaagcaggtgctgataaaattcgtttaaatcctggaaatattggttctagagaaaatgtagaaaaagtcgttaaggcttgtaaagaaaaacatattccaattcgtattgggatcaatggtggttctttagaaaaagacattcatgaaaaatatggtaagccaaccgcacaaggtatgattgaaagtgccaaaagacatgtaaaaatcttagaagatctcgatttttatgatactgtcctttcttttaaatcgagtgatccacttttatgtattgaagcttatcgtcttgcagctaaaacatttgattaccctttacatttaggtgtaacagaagccggtacaaccatgacaagtgccatcaaatcgagtttagctttaggcactttattaaatgaaggtattggaaatacaattcgaatcagtgttaatggtgcacctgaaaaagaaattccaatcgtaaaggaattattaaaagactgcaagctcatcaaaaatgtacccaatctaatcgcatgtccaacatgtgggcgaactcaatgggatatggagccggttgtcaatgaaattgaaagctatcttcaaacgattcataaagaagtaacagtagccatcatgggttgtgcggtcaatggtcctggtgaagctaaacatgcggatattgcgattgcaggtggcaaaaaagaaggcttattgattaagaagggtgaaatcattgaaaagattccacaagatcagattgtagctcgtttaaaagaagaaattgataaattttaa

SEQ ID NO: 2636 - DNA, 756 bp, Holdemanella biformis
atgttgacaaaaagaataataccttgtttagatgtgaaagatggccaggtggtgaaaggcattcattttttgggcctaaaagaagttggagatccagtttctctggcaaaaaaatattatgaagacggtgcggatgaattggtgtttttagatattagcgcaactatagaaaaaagaaaaacaatggtcgatgttgttaggcgcgtcgcaaaagaaatatttattccttttacagtaggtggaggtatttcaacaattgaagatgtgcgtgctatgttgatggccggagccgataaggtaagtttaaatagtgcagctattcgaaatccttctttaattgaagaggcaagtaaacgatttggcaatcaatgtatcgtattggcggtggatgcaaaaaaaagagccgataatacaggttggaatgtatatgtagaagggggaagaaaagatacaggaatcgattgtatggaatggatcttaaaaggggtatctttaggagccggagaaatcttgttgacaagtatggatgcggatggaacaaaagatggctttgatttagatttatatagagctgtttctaaaattgtaaatgtacctgtgattgcttctggtggatgtggtaaattagaagattttaaatcggcattagaagtaagtgatgctgcacttgcggcaagtatttttcattatgaagaatctagtgttttaaatgtaaagaagtatttaaaagaagaaggagtcgcagtaaggttatga

SEQ ID NO: 2637 - DNA, 600 bp, Holdemanella biformis
atgattggaattatagattatggtatgtccaatttacacagtgtaaaaaatgcttgtgattatttaaatttagatagtgttgtttcaaaagatgtttctgttttatctaaatgtgataaattgatcttaccaggtgttggagcttttcaagattgcatgaacaccttacattccatgggattatacgattttgttgttcaacaagtgaaaaaagatgttcctttattaggaatttgtttaggaatgcaagccttgtttgaatcgagtgaagaaaatggatattgcctaggctttggctttataaaaggccatgtttgtcatatggaagatacaagcgttaaaattcctcagattggttggaatgttttagaaagtagtcaggcacaaaacatctttaaagaaaacacgtatgtgtattatgtacattcttattatgccaaagatatggaaaatcaagatttaattggatattccatgtatggaaatatgaaaataccaggtcttgtgatgcacaaaaatataatgggatgtcagtttcaccctgaaaaaagtggaaaagatggattaaaaatattggaatattttggaaaggagttctaa

SEQ ID NO: 2638 - DNA, 1038 bp, Holdemanella biformis
agtttatacaatttaaattatgatcaaatgtgcgaatatgcattggatcatggatggaaatcttatcgtggacatcaaatttttcaatggttatatcgtaaccgcgtatttgatattgatgaaatgacaaatgtatcaaaggaaacaagagaaatcttgaagaaagattttattgtgaatcctttagaattaataaaaaaacaagtttcacatgatggaacgacaaaattcttgtttaaaacaagtgatggagccctattagaaagtgttatgatggtctttgactatggaagaagtgtatgtgtttcgagtcaagttggatgtaatatgggttgtgcattttgtgcaagtgggcttacaaagaaaaaaagagatttgacaagtggagaaatggttgcccaagttatgtatgttcaaaaagaattggataaagataacttacgcctatcgcacattgttgtcatgggaacaggcgagccatttgataactatgacaatgttatgaattttttagctacggtaaatcatgatcgtggcttgggtattggttctagacacatcacaatttcaacttgtggaattgttccaagaatctatgattttgccaatgagcatacccaatacaatttggccatcagtttacatgcaccaaatgatgaattgcgtgatcaattgatgcctgtaaaccatgcatatccattaaaggaattgatggaagcaattcagtattatggtaaggaaaataatcgtcgtttgacatttgaatatattttattaaagggtgtcaatgatcatcctgaacatgccaaacaattatcgaagcttttacatggaatgaatgcctatgtaaatttgattccatataatgcggtggatgaaaaaggcttcaaatcggttacacatgatgaggcgatggtattctatgatttgttgatgaaaaatcatgtgcgttgcacaattcgaaaagagcatggtaatgatattgatgcagcttgtggtcagttaagaattaaggaaataaaaaaggaaggaatttaa

SEQ ID NO: 2639 - DNA, 633 bp, Holdemanella biformis
ttatgctgccacaaaaaaatgagtgaaatacgaaattttgatattttcttttataatgatttgattgtttgtccggattgtatgaaaaattttaaagtgcataaacagacgtacagaatcaaggaaacattcatgtatgtattgtatgaatatgatgaatttttagaaagattgttttttcaatataaagaacagagggatattgttttaaaagatgtttttttaaattttcataaatacttgagtaagacttttaaacattattgtgtgtgtagtttatgtagtagtgatgctaagcgcatggaaaggggatttgagccagtggtggatatatatgcgactttaggtgtctttgtgcattcgccattttataaaaaagaaaatgtaaaacaatcttcaaaatccaggcttgaaagagcacatataaaagatgtattagctttaaaagagatgtatccactgcctaaaaaaaagaaaatattgcttgtggatgatgtgtgtacaacgggaaatacattgtatgctgctttggatttgattcatccagattgtatatttgtgatagcggcgcatcctttatggattaaggcaaataaagaaaacatagtggtcaaatcaaaggggttttggtaa

SEQ ID NO: 2640 - DNA, 2103 bp, Holdemanella biformis
atgaaagagccatatgaggcttatttagatgattataattgtttggatgtttatatgtccaaaaatttttttggtggaaaaagccgaatcttccacatgaaggatacaaagaatcgtattatccctttgacaatacggtcacaatccgacttatataatggattcacccattatgccctttctttaaatggaaatttagagattggccaagaatatacagtatatgatgaacattgtaagacttgtgtcgccaaatattctcatattgtcaaaacagagcgttttgcgaaagagtttacgtatgaaaaagatgatttaggtgtgacatatacacctgaaaaaactacttttaaagtatgggcaccaacagctttatctgtcaatgttggatatgtcttgaatggtaagagaatcgttgaatcgatggttcgacaagataagggtgttttttcacttactgttaattcagatcttaatggcgtacattactcttatttagttcgagtcaatggtgaatataaaggggtaacagatccatatacttgttttagtggtcccaatgcacaatatagtgtggtgatagatcctaaaagtttaaatcttccaaaaaaaatcaaattgaaaccaatggatagtgaatgtgatgcgatcatatatgaagcaagtgttcgtgatatgactagccaaacaggaattggcatatcacattctaaaaagtttgtgggatttacggaagaaaatgaaatcacaaagacccataatacagggtttagttatttaaaatcattgggcgttacacacgtacaattgatgcctgtttttgactttggcagtgtcgatgaagtatatccaaatatattctataattggggatatgatccggtgcaatatcgttgtttagaaggtgcttattctctagatcctgccaacgcgaaattaagaattgaagaatttgcgaaactcgttcatgattgtcataaagcagggattcgtgtcaatttagatttggtgtttaatcatgtatatgtgaaagaaaactttgcacttgaaaatatggttccagattattatttcttaatgaatcgggatggtgaattctcgaatggtagtttttgtggaaatgatattgatactcagccttatatggcacgtaaatattttattgaaacatgtaaaaaaatcattgaaatgtatgatgtggatggattccgttttgatctaatgggaattcttgattttaacttgatgaatgaaattagtgaagagtgtaaaaaagtaaaacctgattttatgatttatggagaaggttggaacatgccaagttttgtggctgaagagattcgtgcttcacaattgaatcaagcgaagatgccacatgtaggtcatttctcggatcgtttccgtgaagtggttcgtggatcaaatgatgaactttcacgtaaaggatttgcctcaggtcaagcggatttgatctatcaagtgaagtgttgtatggcagctagttgtttagatcacgtgttcgatagtcctacaaaagtagtcaactatgtagagtgtcatgataatcatacgctttgggataaaaaccgtgtatgttgtcatggtgagagtcgtgatttaagagagaaacgtcaaatacttgcgaatgcgatggtattacttgcgcaaggaattccatttattcattgtgggcaagagtttggtcgtaccaaacaaaatttaggcaacacatataatcgttctgacaattataatcgtgtggattatcaaagaagagatcatcatattgaaattgttgagcgtacaaaagaattgattgaaattcgtaaaacacacccttgttttagattaagtacggttgagcagattgaacaaggtgttcaatttgatacgatatatgatcaggtcttagtctattcttgtcaaaaagacaaagatcattgtgtagctttctttaatccgacaaatattccatatgattatcacttggatcaagaagctcgaatcttgtttgataatggcaacagcaattctttagatacgtttgatattcatattgcagcatttagtgttgtcgtttgtcaatttggcttgacggcttag

SEQ ID NO: 2641 - DNA, 933 bp, Holdemanella biformis
atgtttaaatgtaataaattattaggcgcatcccttgcagttgtaatgggtgtttcagcttgtgccacaaatgtattcgcaatcgatacatctgtcattgatgaaaagtggggtaaaccaaccgttgtatatggtggtggtttaacgaatgatcaaattcaaagtacacgcaatctcttcgatattgaagatacaaataacgtatatgaaacaagcgttgatgccaatgatctatataactaccttggaattgctggtggcgatacatctagcttgatttcaagtgttatggtgcaaaaacaagatgcaggaaaaggtgtcaaagttaagatcatcacagaagataacatcacaaaaatcacttcaaaccaatatgccaatgccgccatcacagctggtgttagcgatgttgaaattgatgtagcttctgtttcaaaagtaacgggagaatctgcattaactggtgtttataaagctttagaagccaatggcgaaacattagatttagatcgtactcaagttgcccaagatgaacttgaaacgacaaatgaaattgccgaaaataatgcagataattcaaattttgattctggacgcttagatcaagctatggttgaaatcaaacaagaacttgccgaaatcaaaaaaaatcaaggaagtgctgcaacagctgaacaagtcgaacaagttgtaacagacgctttaaagaaatttaatttaagtgacatcatctcacaagatgatattgataaattaattgcgtttgccaagaaataccaaaatacttcagccatcgattcacaagaagtattggaacaattaaacaaattgtctggtaatttgaaaaatcaattatctggacttatcaacaaagcacaatctgagggttggttcgataaaatcatcaactttatcaaaagtctatttaactaa

SEQ ID NO: 2642 - DNA, 2415 bp, Holdemanella biformis
atgtacgatcatttagaagtagaaaagaaatggcacaagtattgggatgagcacgaaacatttaaaacggatgtttgggatttttcaaagccaaaattttatgcgttagatatgtttccatatccaagtggagtcggacttcatgcaggacaccctgaaggatatacagctacagatatcgtttcacgtatgaaacgtatgcaaggctataatgtacttcacccaatgggatatgattcatttggtttaccggctgaacaatatgctgttcaaacaggaaacaatccaaatggatttacacaagaaaatattaaaactttcacaaatcaattaaaagaattaggttttgactatgattggtcaaaaatgattgcgacatccgatccagatttctatcactggacacaatggatttttaaacaattgtataaagatggatatgcaaaatatgtggatatgccagtaaactggtgtgaagaattaggaactgttttatcaaatgacgaagttattgatggtaaaagtgaacgtggtggctatccagttattcgtaaaaatatgaagcaactttgtattgaccaggctgcttttgcggaaagacttttagaaggcttgaatgaaattgattggcctgaatccacaaaggaaatgcaaagaaactggattggacgatcaacaggtgttgaagttcaatttgaaatcgtaggtggaggaaaattctctatctttacaacatgtatcgaaactatctatggtattacatttatggtccttgcaccagatggagatttagtgcaagaattaatgccaagaatcaaaaaccaagatgaagtaaaggcttatatccaggaaactgtatcgaaatcggaaatggatcgtacagagttaaataaaggtaaatctggttgccgcttagaaggtattaaggcaatcaacccagtgaatggtagagaagtggaagtctttattggagatttcgtattagctaactatggtactggtgctgtcatggctgtaccaagtcatgatcaacgtgactttgaatatgcgattgcccacaatattgacatgattcaagttattgaaggacaagacgtcagtgagcatgcctttgaaaaacaagattacttaggtaagggctgcaagctaatcaactctgaagaatttacaggtcttactgtagaagaggcaaaagtagctattactaaaaaattggtggatatgggtattgccaaagaaacagtaaattatcgtttccgtgaatggatctttgcacgtcaacgttattggggagaacctgtaccaattgtgcatttagaagatggtacagattatgtacttccagatgaagaattgcctttaattcttccagaacttgaagattataaaggacacaatggaaaagcacctcttgaaaatgcgacagattggaaacaatacaaccaaaatggtgtaaagggagttcgtgaaacaagtacaatgccagggtctgcaggatcttcatggtactatttacgttatattgatcctcaaaataaagaacaattaggaaatccagaattattgaaacactggatgccggtcgatttatatgtaggtggtcctgaacatgcggtaggtcacttgatgtattcacgtatttggaacaactacttatatgacaagggaattgttgcatgtaaagaaccgtttaaaaaattagttcaccaaggtatgatcttaggtgaaaatggaatcaagatgggtaaacgttatcctgaatttgtagtgaatccttcagatatcgttaaaaaatatggagccgatacacttcgtttatatgaaatgtttatggggccattagaacaaagtaagccttggtcaatggcaggttgtgatggtgctagaagatggatcgaccgtgtttatcgtttatttattgagtctggtaaagttacagatacaaatgatggtaaattagataaagtctataaccagacagttaaaaaagttacagaagattatgaatcattaggattcaatacagcgatctcacaaatgatgatctttgtgaatgatgcatataaagcagaaaccatttacaagccttatgccgaaggtatcgtgaagatgttatcttgtattacaccacatattggtgaggaaatgtggcaattattaggtcatgaagataccattgcgtatgagccttggccaacttatgatgaagcaaaattagtggaagatacagtaacttgtgttgtacaggtaaatggtaaggttcgtggtaaatttgtggcggctgtaggttcaagtaatgaagaattagaaaaacaggctatggaacttgaaacagtaaagcgccaaattgaaggaaaaacaattcgtaaagttatcgttgtaaaaggtaaagttgttaatattgttgccaactaa

SEQ ID NO: 2643 - DNA, 1554 bp, Holdemanella biformis
atggaacaaatgacagaattaacaaaaaaagtattagaatttttagaaccagattcatcgaaatgggcgtattggacaagtaaacagcttttaaatccagtttctgaatcgaaatgtatggaaagatttaaagaacgaatattaaaggctgtttcaaatcgtgaaaaagtaattgtagcaggagactatgattgtgatggtatcagtgcaacaacaatcatggtgtcaggcttaagaaaattaggccttgaatgtggcttttatattccggaccgtattaaagaggggtatgggcttagtgaagcaacagtgatgttggcacataagaaaggatattctttgattcttacggtggataatggcattaaaagtaagccggctttagcactttctaaagaattgggtatggatgtaattgttacggatcatcatacaatggatgaagaagtgaattgtgatattgttgtacatccagatttaatggagccatgctttgaaaccttatgtggagctggaatagcctatgaatgtatgcgaaaacttggtgtagagggtgattatcttttacagcttgcaggtcttgcgagtatttcggatatgatggttgtcaaagggcaaacgcgagctttgattcagaatgcattaagatcaatcaatgaaacacatgaaaaacatattttttctttagctacagatcgtgacttaaatgaaacaagtattggttttcaggtggttcctaaattaaatgcgattggaagattgagcaatcttgccaacgtcaacaatgtggtccgatattttttagcacatgatgatgaaacaatttatactttgggttcgcaaattacacaaatgaatacgattcgtaaacaaatgtcggatcagatgcaaaaaacagctttattaaagtgtaaatcgaatgaggatatctatatcattgaagatacgagttttcatgaaggaatcataggtttagtggcgggtgcactttgttcaagatttaataagccttgtattgttctagctaaaaatgaacagggatataaggcgagtatgcgtagtcctgaaggctttaactgcatggaatttcttggcccatacaagcattttgtcgtatttggtggacatgaaaatgcagcaggcttttcattgaatctaaatgagtttgatttgtttgaagattttgttcatgcgcgtatcaaggaatatatgtatagtgtgaaaaagaaaaaaacattaattataacggatgatgaattgagtttagaaaccattcaatccttagatgtacttagaccttttggtccgggctttgtttttcctagttttgaaattattcatcctcaaattaagtcgttgtatgattttcaaaatcataaacatcgtaaatatacattagaatctggcttacagtgtatgcgttttaatcaaagtgaagtagagtataaaaaaagtgtgaatgcgattcattcttttataggtacggctcaaatcaatcaatatcagggccgtaagcaggtaaattttgtgattgatgagattgtatatgagtag

SEQ ID NO: 2644 - DNA, 1281 bp, Holdemanella biformis
atgttgacacgaatttataaagaagataaggatgtattaaaagaatatttgatgtcgcgaacacaagatttaagtacagacgtactggtggctgtatcaaatattattcaggatgtaaaaaataataaagatgaggcctgtttaaaatacactcgtgagtttgatcatgttttgttagatacaatggaagtgacggaagaagagttagatattcagatttctaagtgtgataaagattttgtagaagctatgaaacttgctaaaaagaatattgaagatttccataaacttcaaaaacaaaacggatatttacttcaaaaagaaatgggaatctatttaggacaaagagttcttcctttagaagctgtaggtatttatgtgcctggaggacgagcacaatacccaagtagtgtcttaatgaatgcactgcctgcaaaaattgccggagtaaaaaatgtagtgatggtaaccccaccagattcagaaggtacgattcatcctaatattgcatatgccgccaagcttgcaggtgtggataaaatttataagattggtggagcccaagccattgcagccttagcttatggaacacaaacgattgatcgtgtagataagattgtgggtccaggaaacatttttgtggcagctgctaaaaaattagtatatggaaccgttgatattgatatgattgcaggtccaagtgaaatcttagttgtagcggatgaaaatgccaatccagaatatgtggcagcagatttattatcacaagctgaacatgatcctatggcaagtgcgattcttttgacaacaagtgaagatcttttaaattctgtgaatcaacagctttcaaaacaaagtgcaattttacctaaaaaagaaattgttgaacaatccttaaagaattatggtaaggccattgtttgtgattcgcttgaagaatgtatttcaattagtaatgagattgcaccagaacatttagaattaatgatttcaaattcaatggaatatctacaagaagttaaaaatgcaggtagtgttttcttaggctattatacttgcgaaagtattggtgactattttgggggaaccaaccatgttttacctactagtggcactgcacgattttctagtgcattatctgtagatagctttataaaaaaatcatcttatttatattattcaaaacaagcaattgaagcttacgcaaaatatattgagactatagctagtgaagagcgtttacaggcacacgcaaatgccgcaaaagtgagggaaaaataa

SEQ ID NO: 2645 - DNA, 1167 bp, Holdemanella biformis
gtggttttagtggacctacatgaaaaagagaagatgtaccaaagacttataatttttacactattgattggaatggttatctattattttgaaaagatcttttgttttttaggttggattggacaaatgtgcttaccatttttacttggagccggtttggcttttgtgtttaatattatttcgaataatctaatgcgctattcgataaaatggtttgacatcaaagatacaaaaatcaaacgaattatttcgaatgtattatcggttctaatcgtttttgccgtctttgtcgcatttgttggaattgtcataccaagaattttattttctattcaattgctgctgacaaattttccaaaaatgatttatgaattatatatttggcttttagatgtcacaaaaaatattgatgtgattcatgattccttaaaaaacttagacatcaacgcctttagtacatttgcgattgataatgtctcaaaaaaaataagttcatggcttgtttcagggggagctaacgatatattcggctctatttttacaattttatccacaacattttcatggtttgcgcaagcctttatcaccattgtcttttcttttttattgctctttaataaagaacaagtcgtacatgaaacaaaatctttattaaaagcttatcttcctgaaaaaaattatgatcgagtgcgccacgtattaaaacttattattcgcatatttacaagttatgtgggaggaacctgcttagaatgtttaattcttgcaagtttagtcactgtaggatccttgattttaaaaataccatacgcatttttagttggacttgtcgtgggtattggcgctttggtacctatgtttggagctttggttgccgccatattatgcgctttctttattgcgatgacatcccctgtacaaggtctaacttttatcattatgtttatttgtatccaacaagtcgaaggaaactttatttatcctcatgtcgttggaaaatccgttggctttccacccatgtatattattgttgcgatcacaattggagcgaatgttgcaggtattattggaatcattatctttattccaatttgttcatgtatttatcaattggtgagtgaagatgtgttaagtcgtcttcaaaaagtaaaagaggtaaccgattaa

SEQ ID NO: 2646 - DNA, 2475 bp, Holdemanella biformis
atggcccaaccacaaaatgaacaaaaaaagccaacagcaccaaagacaaacagaagaaaattagatatatggaataaacttgccgtaagtatcctatctatattcttagttggatgtatatctgtattctttgtacttgtgaacattattaatgatccagatggcatgcgtttttcacaagacggcttaacaacattatccaattcaagattatatgactcttcaggaaatttattctatgaactcggtgatgaaatccgtgaagacgttacatattcacagattccacaatcggtagtggatgccttcctttctatcgaagattcacgtttctttgatcacaacggatttgacttgccacgattcttaaaatccgcaatggcaaacttaaaatctggtagtttttcacaaggtggttcaaccctaactatgcagatgattgataatgcatttacgaaaaaccaagagaaaaagattgaaacagaacaaggctctgtttcaacagttcaaaagttaaaattaaaagtacaagaaatctacttatctttaattgctgaacaaagtatcaacaaagaacaaatatttgaatattatgtaaaccgaatttggtttggttccggaaacaatacgcgtggtattcaaaaagcagcacaatacttctttaataaagacgtgtcccaattaaacttaggtgaagctgcattcttagctggttgtatcaatgcgccagacacatataacccattaaacaatttaaacgaagctaatacgacaacagatcacttgaaagcagctcaaaatcgacgtaatgtgactttggaattaatgatgcaacatggatatattacagaagaagaatataatcttgcttcaaatcaagacatatctttctctttacaatatattgaaagaacaagtgatgatccaaaccaagcttatattactcaaacacttagtgaagttatggaattgaccggacaagatcctgccattattccaatggatatctataccgcattaaatcaagatgctcaaaaacaagccgatgaaatctgtaatggtaatatcgtacaatatccagatgaagcatttgatgtaggtttctcaatgattgaaaatgatacaggagaaatcattgcggtaggacctggacgccgttaccactctgactctgttaaaattgataactctacagattcaaaacaacctggttcaacaatgaaaccattgcttgcctattcaagtacatttgatattcttggctggtctacagttcaccaggtaaacgataagaaaaaggattattggaagaatggttcttatgcaccagtaaactcagatggtaaatacaatggtaaaatgagtttacaagacgcattaggcgtatcaaaaaatacaacagccgcgcaagctatgattgatttagtaacagccaaaggctatgattactggatcgatttctgtaagaagcttggttacgatgaagatgtagctaatgcattcaatgaacaatatgcgattggtggttctggaatgtatgcgagcactgtccaacaagcaagtgcctactctatgcttgccaatggtggtaaacgtgtagatgcccatagaattcgtaaagttattcgtagatctgataaaaaagaatttgaaacaaaagctcaaacacatgaattaattagtgaacaagccgcttggatgatgtcgcaattgcttgaaaaagttgttagtggtggctacaacaactacagcgacatcttaatgagtaattatacagtttatggtaaatcaggaacttccgattggcaaaatgaaggtgctcaatatggtattcctgctggtaccgcaaaagatgaatggtctttaggttatacaaacaaatatacgattgcttgctggagtggatatacaacagaatatattcaacaaggctactacattacaatctatgatttaaatgttgcgactgcattccatatttctcactatatgttagattacatgcaaaaatatgcaacatattcagctattgaaagaccaagtggtatttccgattataagaacggatatatcaaagatgagtttaaatctaaaggagatacagcttctgaaaacgcagacgaacaagaagcatgtgttgccagtggtggtgaatgggatgcagaagctggaacttgtaagaaagctgacgatgaagaaaaagaagcttgtgttgccgatggcggaacttgggatggaactacttgtaaaaaagaagatacagaaaccaacgatgcagaaacaacatgtgtaaataatggtggtacttgggatggaagtgcttgtacatatccaactacaccagatcctgaaccaacaccagatcctgaaccaacaccagatcctgaaccaacaccaacaccagattctgaaaatccaacaggatatgtctggtatgatcgaagaaatttatataacatatttgatagactttag

SEQ ID NO: 2647 - DNA, 834 bp, Holdemanella biformis
atgaaacttgtttttttagatgccgatggcacactatttcatcacgaaggctacattccagatagcgcaattaaagcttgtattcaagcacaaaaaaacggtcataaaatcattttatgcacaggaagacaacgcattgaaatctttggtcccatgttagaaatcgactacgatgcgatcattgccggaagtggtgcaaccattgaatgcgaacataaaattattgaagaaaacgcattatccaaagaagaaagtcaatatttatcaaactaccttcttaaaaataacattccagctaactttgaaagcagtacaggcatctatgccacacaatatacaaaagatacgatgttaaaaatggtcgaagaacaatgtgcgggtaaaacccaagaagaaaaggccaaacatggccttacgattcttacaagtcaaattacagttgtcgacaacattcaagacttaatctacaataaagtatctgtcattgacaatggaaaaacaccctacaaaaaaatccaacaagatctttcggataaatatgatgtaattcctgcaacatttgcgcctttgggaaaagaaagtggtgaagtcacatcttatcatatcaataaagcaacaggcatggatgccgtagtcagatactttcatgccgacatcaaagatactattgcgattggagatggttttaatgatcttcctatgtttaaaaaagcacatctaagcattgccatgggtaatgcaccacaagaaatcaaagataaagcagataggatcacaacatccctagaggaggatggtatttatcatgcctttaaagatttgaatctgatttaa

SEQ ID NO: 2648 - DNA, 1152 bp, Holdemanella biformis
atgctagaagcttatagtcgagcttggactgaaattgattatgatgcgatccgtcataatgtaaaagaagttaaaaagcttgtaaaaaacacaaaaatcatgggaattgtgaaagccaatgcgtatggcttaggtgatgtcgcatgtgctaaggctctacaaaaatgtggtgtggactattttggcgtttccagtattgatgaagcattaaatcttagaaatgcaggaatccaagataacatcttgattttaggatatacaccaagcatgcattttcattatcttcatgaacagaatatcgttcaatctttagtatccattgaatatgctagagaattaaatgcctatgccaaagaaaatgatgtaaagattcgttgtcattgtaaagtggatacaggtatgtgtagaacaggtattgtatatcaagaacaagataaacatattgaagatatttatgaagagtatcgcttagaaaacttatgtgtagaaggaatcttttcacattttccagtgagtgattgtttagatgaagattgcactgaatttacaaaaaaacaaattcaattgtttgatgaagtgattgatttattaaaatcgcaaggtattgatccgggtattcgtcatcttcaaaatagctatggaatcttgaattatccagaacttgaatatgaatattgtagacctggcctattatatatgggtgttacgagtgatgatcatattaaaatcaagacgaatcctgattttattcccatcatgtctatgtatgccaatgtaagtttagtgaaatggatctatccaggacaaagtgtaagttatggtcgtcattttatagctgaaaaaccaacaaaagttgcgactatgagcattggttatgcggatggattgccacgtttattatccaatcaaggattcgaagtattagtacatggtcaaagatgtaaattgattggaaacttatgtatggatcaatgtatgatcgatgttacagaagtagaaaatgttaaagaaggcgatgtggtatgcatcgttggtcatcaaggaaatgaagtggtaactgtagatcaaatcagtcgtatggctaagactatcaacaatgagacattaacttcaatttcttcacgtgtgcctagattaaaggtgcgctcatga

SEQ ID NO: 2649 - DNA, 1761 bp, Holdemanella biformis
atgatttggatgcaggatgtagcttatactgactatatttattggcaggaaacaaattcgtttatcaatggtgtagcttcatcgagtcaaaatatagaattgttttttgacaagaaagtagaccgggattctagtttagttatttatgatggaaaacaagtggatctaagtcacgatcatatttatattgatgttcaaaaagaaggtgttacacaactcatttatatattaaaagatgtggatggttatgctttagaacaaggtgaaaaatccattcttttagatacaacgattccagatattgtagttaaggtaaagaatcataatattatggatgttttgcctttagaaaataaagaaacaattcatgttgagattctagaagaaaacttaaaaagtgtagaagtgtatttagatgatgaaaaaatggattgtgaaggcaaagaatttgatatagatgtgacaagtcaaaatcatacattaagcattctttgtagagatgttgcgggcaatgaagtagaacgaaagattgatatattaccaatcgtgtttcctgaatgcgagttaaaggacacgttatatacaaaagagaataagatggatcttaaatttgatggaatttgtgaaatgccattttatttgaaggtatattgtggacaagatttatgttattctctggatttagaaaatcgagatgcaataacagttgattttacttcaaatggaacgtatacatttgttctagaacataaggaatatcctcaaattaaaaaagcattagaaggatcgatagtatattcaaacataactcccatcatcactttacagccatcaagtaaagtttcaaatgaagatgtatttgtaggtttaaattggtatgttccatatataaagaaagcttatgtagatgtagaactcgatggaatcaaagatcgtcatccgtttaatgaagatatttgtttaaaggctgtagaaaataaagatttattctataaagtttttgcgtatgctttagatgcctttggaaatgaagtttcggatatggttattgtacgtattgataagcgggctccatcaacaagtttgtatttaaataatgaacaggtattggataaaaaaataattaagaaattacctgaatttgaatttttgatcgatgacaatcgtgcaaatatgcgtattgaatattacataaatggtgtattgatggatatggatatcgaaaaagtattcaatcgtatgattaaagatgatgtgttaaaggttaaaacgtacacttatgatgcattatcaaattttgaaataaaagaatatgaatttatgtttagtccagataagaaaatagaaatggtttccaaaagtgaacagatcttgcgtagtgatgaagtggctacatttgaacgaatatggagtgtaaatgaaaagaatgaattggtcttagaaaaaaatacaaaagttcttacttcaaaattgaagccgaagattcattatgtgcgaaaaaagaataaagtacaaattttttccaaagatcagattgaatcttgttttgtgaatggaaagaagattgcgattcaaaaagatgtgttgggacatgattttgtggaaatatcattaaaaaaatcaaaaacgaccattgaagtcaaagctaaaaatgattcgggtgttactacgataaagaaatcagaaattaaaaaaccaatcttaaaaaaatcatttctaaaacaattgtggatttggatttgtcgtatctttaaattatga

SEQ ID NO: 2650 - DNA, 585 bp, Holdemanella biformis
cccatacaaatcattttatatgatttgatgggctttttttatgctataatcttaacgaaaaagaggtattgtatggaagaaaaattgatctataaaggtattatctttgatttagttcaaaagaatgtaaaaatcaaagataaaatgtataaacgagacatcattcgacatccaggaggtgtgggtgtcatttgtatcatcgatggcaagatcttacttgtacgacaagagcgtccggcaattggtaaagaaacacttgaaattcctgcaggtaaactcgaatatggtgaagatcccatggaatgcggacttcgtgaactaaacgaagaaacaggcatggcctgtgataaattagaactattattaagttttgtatcaacaccaggcttttgtgatgaaagaatttggatctataaagccatccatccaagaatggcagatgttaaactttctttagatgaagatgaggaaatcgatactctatggttggatttagaaacggcttatgaatatacaagaaatggaaaaattgatgatggaaagactgtcattgcgattagtcaaatgatggcagaaaggaaataa

SEQ ID NO: 2651 - DNA, 1518 bp, Lactobacillus vaginalis
atgaaaaattcgttgacggcagtaatttatttacaaccggaccagattttcttacgaattatcaagctcccaagcctcaaagtagttaatgacgtccgttctggattatttgctattggtgaagataataaaactgctaattatcgaaagaacatggcagcaatcactgataatattgaaggcttcaaggaactgattagcgattatcaggttgatgatattaaattctatggagcctatgaagatatggatagcgtcaccgcaagttatgttggtgatcagctgaaggttcgtacgggactgaaaattgaatggctgaataataatcaattaatggcccagtcaatgagttatattgttgatcagttaccagaatttaagaatttaagcaagcattgcctgtatattttgagtattggattagatagctcaacactggcatttttccatcatggtaattttgagacttcatgggaaattgatcttggcggggcccagattcaccgccttgttaaccagttacggcagacgacgactaatccgacagaaattattcaggattacattggtagtaagcttggttacttagcgcctgaattaacgcggcaaaagaagacgacgatgattgttcagaatgcgccttcgttggcaaaacgctatgtggataagcaccaaaaaattggtgaaattgaccgtcaaaaattccgtgaaacgtttaatcacctattaattcctcaggatcgatacatgtataacaatgatattgacccgacagaagctcaggatgaatatattttaccaaactatttggtgattgctcgaatgtcagatctgattaatccatcaagtctttatgtgacaaacctttcgattatggatggcatttcaaacgggatcgcaacggccaatgatgtttctcaagctaccgtaaataatatgattcagacctctgctgataatattgctaaacggtacgggattgattttaatcatgcggactttgttaagaagtatgcacttcaattctttgatgaattacggccaattcaccgactaagcaaccattaccgtcttttgcttgaagtggcggctaaggttgatgatattgggaattttattaaccagcaagggcactatcgacattcggcatatattttggaggctaatcccatgatcggtctctccaatgaagataacctaattattgcggaagttgcccgttaccacagtactgaaagcccaaccattgaccagtctcattatcgtcatttggacgaggatattcagatgccagttgccaagttagcggcaatcttaagattagttgattccctagatgattcacgacagcaaaagattagtcggattcagctaaaattaaagaacgggcgactaattattaaagcgactagctcagacgatttagtactagaaagctggtcatttagccaaaagtcacaactctttgacgatgtcttcggtattaaacctgtattaaaggaaaaagaggggcggtaa

SEQ ID NO: 2652 - DNA, 408 bp, Lactobacillus vaginalis
ttggacgaaggaaagaagcttccagaaccggttgaggaaactttttataagagtgatgaattagacgatccatttattaatgagtcggcaacaattgcgttaggaattgctacccatgctgaacttgaaaaaatgtggggcatttgtcgagaagttaatggcctgttgacacccctttttgaaaaagcaggaatgcaattagttgactttaaattagagtttggtcggttaagcaatggtgaaattatcctagcagatgaattttcacctgataattgccggttatgggatattaagaccgaccagcacatggataaggatgtttatcggcggaagctagctgacttaactcaaacctatgaccaagtattagcgcggttggaagacgttattgcggaggataagtaa

SEQ ID NO: 2653 - DNA, 759 bp, Lactobacillus vaginalis
atgaaaattattatttcaccagcacgaaaaatgaagagcgatcccgattctttaccgtatgatgctctccctcaatatttggagcagagccaagaaatactgaagtggttaaacacattaacatttaaacaattgcaccagctatggtggaattgtagtgagcgacttgcgcagactaactatagacgcgttaaaggaatgaaccttactgataatctcacgccagcagtcttggccttccaaggacttcagtatcagtacattggcgctggggtaatgactgagcatcaattaaggtatcttcaggaacatttgcgaattttatcagggctttacggaatccttaaaccatttgatgggatctctcaatatcgcttggggatgggtgatcgagcaacggttaatcatactaaaaatttatatgagttttggggtgaccgcttgtatcaggagctgtttcgggataatcaattagtgattaatctcgcttcaaatgaatattcaaaggcaattaaaccattcttgcggccacaggatcgaatgattacttgtatctttggcgaagaaattaacggtaagattaagcaaaaggcgaccctagcaaaaatggctcgggggaatatggttcgttttttaacagaaattaacgcagccaaatcaagtgatttaaaaggcttttccgttggtggatatcaatttcgagcagacctttctacaacggaaaagtattattttgagcttcagaaacataagggctag

SEQ ID NO: 2654 - DNA, 1029 bp, Lactobacillus vaginalis
atgtcaattattaaaacgaagagctttttgctggctgccgtgatgactctcatctgtgcggttgctggggttcttctagcaaagctaccgtatgttaacctgattggggcactagtcattgcgttgcttcttgggattgcaatgcaactgacaccaagtaaactacaagctgatgccaaatcaggaatgggctttatctcaaacaagtttttacgtctcgggatcatcctacttggtttccggctaaatcttgagtcactcgcccaagctggggtaaagacgatccttgttgcgatggttggggttaccggaaccatttgcttaacttactggctcagccgcaaatttggtgctgaagatgagttagcaattctctctgcttgtggttgcggaatttgtggtgctgctgccgttatgggggtttcaccacagattgaaactaccgatgaagaacggaaacgggaaaatgaggttctcgcggtagcagttgtttgtgttatgggaactgttttcaccttggttgaaattggtcttaaaccaattctgggcttaaccgatccccaatttggaattgttgccggtggatcactccacgaaattgcccacgcagtcgctgctggaggcgcctttggtgaagccagcctagataatgcattaatcatgaagctttcccgggtccttcttcttgctccggtagcattaattgtcggttactggtaccaacgacggctcatccgcgaaagtattgaagaacacgaacaggcaccaaagaaattaccaattccgtggttccttggcgggttcattctaaccagtattctgggaacattcctgccgctttctgcaggattactggatggccttgttcaagcagcctacatctttttaggaatggcaatggcggcccttggaatttcggttaatttccgggtcattttcaaacgtggcggtgctgtctttggtgctgccgcaatcagttcaacctgtttactgatctttatgattgttatgagtcggctcttcttctaa

SEQ ID NO: 2655 - DNA, 1239 bp, Lactobacillus vaginalis
atgaacttatcggcagtcgtagttcttctttgtactgctgttacggtgtctttaattgctttgtgttatgccgatatgtcaagtcggtttaccggatctggagcagcgtggctatattcttaccatgcctttggtcgctttacgggttatgaattagggatctttacctggttcttggggtgttgcacactttcggcagaaattgttgcattattaacaactctcaaaagtttcttaccaatatttaagaaccccgttgcttacggtatcggggcagttggtttaattcttctttttgccctgattaacttctacggtcgaagtattgtgaaggtggtcaataacgtttcggcagctgccaagatcttgacactgattatctttatcgtggttggggtgttctttattcacaaggctaactttacgccaataattccccaggcagcacttaaagaacccatgccgttcttccaccattttggagaagcgttcacaccaattttctacttatttactggcttctccttcttgccaattgctgctcagcagatgaataatcctgagaaaaacattcctcgggtactgatcgccgtaatggttagtgttacgattttggatgctctgatgatggcggttgctgttggccttgctgggacaaagttaggcggttattcaaccccattagcaaatgcccttgggaccgcaattggtaagtggggctattcaattattatctttgggatgctagtaagtatctttggagtggctttttccgcttcatttaacaccccgtcgttaattgcgtcactggatgggatgttaccaaaatttgttggaaaaaagaatcgtcacgatgcaccgtgggttggaattgtgcttacttcggttctttcagcactattttcgactcagagttacctctttttggttagctgtacggttttggcttcgtttattcagtatgttccaacgattcttgccgttgttaaatttgaacatactaatcagtacccgacacacgggtttaaactacctggaaagtatctaattcccgggttggcattactggtttcatgctacatggtcactaactttacatcgaagaccctgctgctgggaacagtgattgcagttcttgcggcagtggcttacttctttattaagggagaccggaaatatgaagaaaagcatgaaaaatggctgaaagaacttcaggctgaagggcaaaaattgaagtga

SEQ ID NO: 2656 - DNA, 303 bp, Lactobacillus vaginalis
atgaagattaaatatacgccaagctttgctgattccctagaacatacgattttatattggcagaacgagctaaaattatccaccgtcaaaattcatcaatttacgtcacatattgataagaaaatcaaattaattggtgcttatcctggaataggaaccgatgttactgagctgtatggctttgagaaacagacttaccgtatcttaattggtcatagttacggtatcttttaccgattagaccaggctaataatcaaattattattggcgcaatctttaatactgcagaaatgaaagttaaa

SEQ ID NO: 2657 - DNA, 1149 bp, Lactobacillus vaginalis
aaaaacgcaaaattttccgttgacggaatcgctgaaattgaagcggttacccaccatgatgtgattgcttttacccgtgacgtttcaaagtcgcttggacctgagcggaagtgggttcactacgggatgaccagtactgacgttgttgatactgctcagggtcttcgtctgaagaaagctaacgatatcattaggaaggatattgacgactttatggcagtcctaaagaagatggctgagaagtataagtacactgtctgcatgggacggacccatggtgttcatgcggaaccaacgacttttggcttaaaagctgcccgttggtattctgaaatgaaacggaacaaggaacggtttgaacatgcggctcgtggtgttgaagcagggaagatttctggtgctgtaggaacatttgctgaaattgatcctttcgtggaaaagtatgtttgtgaacgactcggattgcgggctcaagaaatttcaacccagattcttcctcgtgatcttcatgcagaatacattttcgcaattgcgttaatggggactagcttggaaaatatggcaactgaaattcggtcactgcaacggactgaaattcatgaagttgaagaacactttgctaagggacaaaaagggtcatccgcaatgcctcataagcggaatccaattggttcagaaaacatctgtggctgtgctcgtgtccttcgcggaaacgttgtaacggcgatggaagatgtcactctttggcatgaacgggacatttctcactccagtgctgagcggatgattttaccagattctacttccttaattgattacatgcttcgtcgctttggtcgcatcttagataatttagatgtcttcccagaaacaatgaagaagaacatggataagacccttggcttgatttacagtggtcgggttcttttgaagttagttaacagtgggatgacccgtgaagcggcatatgatttgattcaaccatatactgcaaagtgctgggcagaacaaattccgttccggccattgcttgaggctgacccaacagttcaaaagcaactttcaaaagaagatcttgacgatgcctttgactatcactggcacctccgtcacgttgacgatatctttaagcgggttggcttggattaa

SEQ ID NO: 2658 - DNA, 1143 bp, Lactobacillus vaginalis
atggcaaaaagcaaaaagaaagaaatcgtcatttcaaatagtgataacttcgatcaaaaaaagtatgataccgctgttggtaagttaattcgtacttacaagaagcgcaaacacattaagtatgatgatctgaccgaacttgttgctaaaccatttgaattgaatgctgacgggattgataacctacttcaaaacgttgaagattcaggaatcagtgttgttgatgaaaacggtgatcctgatccgcgagcattaatggccaccgaaaagctatcccaaaaagcgatgaaggatacttcggctccaactggagtaaagattaatgacccagtacggatgtacttgaaagaaattggtcgggtaaacctgttaagtgctgacgaagaagttgctcttgctctccggattgaacaaggcgatgaagaagctaaacaagaacttgctgaagccaacttacggttagttgtttccattgctaagcggtatgttggtcgggggatgcaattccttgatttgattcaagaaggtaacatggggttgatgaaggccgttgaaaagttcgattaccggcggggcttcaagttctcaacttatgctacttggtggattcgtcaagcgattactcgggccattgctgatcaagcgcggaccattcggattccggttcacatggtagaaacgattaataagctgatccggattcagcgacaactgcttcaggatttggggcgtgaaccacttccagaagaaatcggtgctgaaatggatatgccaactgaaaaggtaagaaatattcttaagattgctcaagaaccggtttcccttgaaacaccaattggtgaagaggacgactcacacttgggagactttattgaagatcaggatgcaactagtccagccgatcatgctgcttatgaaatgatgaagaagcaactggaaaatgtccttgatacattaaccgaccgggaagaaaacgtccttcgtcttcgatttggtcttgatgatggtcgtaccaggacacttgaagaagttggaaaagtctttggtgttactcgtgaacggattcggcagattgaagctaaggcattacggaaactacgccacccatctcgttcaaagcagttaaaggattttcttgaataa

SEQ ID NO: 2659 - DNA, 1056 bp, Lactobacillus vaginalis
atgactgatacttggcaccgatttattgccaacgtcaagttacgtcggttcgtggttttagccctaatcatctttattctatggcttcttcgcccgatgatgaacttgatcctgtttacgtttatcctaacgtttatcgttgttagctgggttcgttggcttcaacgacacgttcccaaaatatcaataaaacttaccgtggttgttacgtacattgcattaatcgtggcaatttactttggggttacccgctacctgccagttctggttaaccaagttattaaaatggttaactccgtaatcaaattctacagctcccgacaggcaatcgagatcatgcactacgttaaccactacattagctggggaacgatcatgtcccagatgaagcacggggttaccctcgccgtaagtacattaaccagtattggcacaatgacaattaccttcctattgtcatttattcttagcttcttttacacccttgagctgaagcaaatgaatgcattttcccgaacatttcttgatagtgactttggctggttcttcagcgatattgactactttggcaaaaaatttgtaaatacctttggagttgtcctggaagcccagttcttcatcgccatctgcaatacagtaattacttcaatctgccttgcattcatgcacatgccacaaatttttgcccttgcgctaatggtctttattttcagtttggttccagtcgctggtgttatcatctcgctaatccctctttcaatggttgcatactctgtcgggggaattcgggatgttatctatatcattattatgatttgtgtaatccacgctttggaagcatatgttttaaaccctaaattcatggccagcaaaacagaattgccaatcttttacactttcatcgtcctcctggttgctgagcacttctttggtacatggggattaatcgttggggtcccaattttcaccttcctgttagacattctcggtgttaagtcaatcaagaaaaaaccacattcgcttagagtgcatcatcaagaaaaaaatgaaagttaa

SEQ ID NO: 2660 - DNA, 876 bp, Lactobacillus vaginalis
atggaaaacacttggcaatatcaaggtgcccaaccgattaaaattaaaaagtttcttcaatcattgggaatgggacaccgccttttcaatgatttaaagaatggtcagggaaaatttttggttgatcaccgaaaagttcgaccaacgacgaagatattgcctaaccagccattaactataattgctcaaccggagttgcgtgacttatcggtaaaattgagtgatgccccgcttaatattgtttatgaggacgataattggctagtaattgataagcctgcaggggtaacgtcaattcctggccctacagttgacaatggaactgtccttaatcgtgcagtccactacttggttgaagaaaagtcagctgaccaacgaccgcatttaattactcgacttgatcgttatacaggcggcttgcttttaattgctaagcaccatgtggcatcaagcatgattagtcaacaggttcagcagcaccagatgttaaaggaatacacggcatttgtatcaggaatctttgataaggagcatgacattattgataagccaattgctcgtcgtgaaggacaggttcagcgagttattgctgaagatggtcaacgtgcagtaactgagtattgggtagaagaggaaggtgcagactggactaaattgcgagttcgtttgcatacagggcgcacccaccagatacgagttcatctagcttcaattaatcacccgttgatcggtgatcatctttatggtggtgatacttctaagtaccagcaccaagcactttgggcaactaaactatcatttaaggatccttttaccttaaagcaattaacattttcccgggaaataaatgaaattcctgataagaaaataaaatga

SEQ ID NO: 2661 - DNA, 1056 bp, Lactobacillus vaginalis
atgaaagatgaattaacgatttccaaaataacaactgaagtggtcgaggtacctctggagcagccatttatcactcaccttcatacggttaatgcaatccacgcaatccgggtgaaggtaaccttgaaaaacggtatgatcggtatcggtgccgcaactccgaatgaagtggttacgggtgataatattgacacccttaagataattattgaagaggtgattgcaccgcgactaattggctcttccttggctaatattgaacccctgatgaaacgactacatactgctgtggtagcaaatggaccagcaaaagctgcggttgatattgcaatttatgatctgttaactcaaatctaccatgtctcacttaatcatttgcttggcggaagtaagcaatcaatggcgaccgactatactatcagcatcggtaagccagctgaaatggtggaacaggcaaagaagacggttcaacgtgggtttactgcactaaagattaaacttggcgatcattccattgacgaggatgtggagagtgttaagcaaatcgctcaagctgtcggatcggacgttgcattacgtcttgatgttaatcaagggtggagttataagcaagccttgcgagctttcaaaatgctggctgacgcaaatttaaaccttgattttattgagcagccgcttccagcaaatcagttacgtgatttagccttgctccgtcagcaatcaaccatcccgttaatgctggatgaaagtgtatttacaccagcggatgccttacgggtaattaaagatggagcagcagattatgttaacattaagttaatgaagtgtgggggaatctacgaagcaactaagattaaccagttgtgtgaaagtgcagggattctgtgcatggttggtagtatgattgaggctcctgaaagtattgccgctgcggcagcctttgctaacgctcacgctaatgttcgctttattgatcttgactcagtttatatgattaagaatgatctcgatttgggcgaccttaagcgggttgggatccatttatggcatgcttga

SEQ ID NO: 2662 - DNA, 321 bp, Lactobacillus vaginalis
atggccgataatatcaagcaagctgtcatagaaaccgatgcatatgatgaagtcctgttcagtgctgaaccgaaatactatcgctctcttccgggagaattacctaatcgactggttcaattaactgacgaaggcaaaagcaaaaaagaagtatggcgcgctgccaatgcttatcgccgaatgcacgatggaatgatcgacggtgatcttaataaggggtatgcttcgtttggtcttggcatttctttcattcatcagattgatccaattgataaagtggttgaccgaatttattcgggggtaccggaagaacaacgataa

SEQ ID NO: 2663 - DNA, 339 bp, Lactobacillus vaginalis
ggtgctttagccattgtggatgcaccagaccactcatacgatgctctggatggcaagtggttggtagatactgataagtaccaagttattcaccgggttgcgatccattcaaagcatgccggtcatggttacgcttcacgactttttgaaagtgtgattgattatatcaaagaaaatcggaaggatattaagtctcttcggattgatacccatgaaaacaacgaaatcatgcaacacttgatcaccaagaatggcttcactaaagttggtgaacttcacggtgtatatcgtcctgaagaagaatcctacgtttacgaactagtaacacaaaaggattaa

SEQ ID NO: 2664 - DNA, 855 bp, Lactobacillus vaginalis
atgctatataacgcagcactagttcttgaaggtggcgcttttcggggacagtataccgctggtgtctgtgacacgttcctcgctaaccacattgagtttagcagtgtcattggagtttccgcgggttcgctgaacggtgttaattttgtggctaaacagtacggtcgagcagctaatattaatattgatcaccgtcatgaccgagattacatttccatgacccggctcttcaaacgtcaagtaatcaacatgaactacttgtttgaagatcatggactttcatggcaaaacttcgatgaacgagcctatataagatctgcttcacacttcactgccgtcgcaactaaactccaagacggtaaaaaagcactctttacagacttaacgggggaaaagttaaaacaagttttgatcgcttcttgttcaatgccgtttatgatggatccagcacccactcctgatgggctttgcctggatggtggaattgcggattcaattccctttgatgttgctcaagaacaaggctatgataaaattatcgttgtccggacgcgtgatattagttaccgaaagaagccatcaagtcgaccagtttgtcagttatatcgccgttattttaaggattatccccagtttgctgaagcagggatccttcgtccagaggtttataaccaacaagtagcacaaattgaacacctcagaaggacaggccaaatctttaatattgcacctcaacatcccatcaaggttggtcgagttgaaagtaacgttaaaaagatccgtaaattatacgaaaccggtcaacaagaagcccggcaactattgccaagcttgattgactatcttaatgcttaa

SEQ ID NO: 2665 - DNA, 696 bp, Lactobacillus vaginalis
atgaaaaagctggatggtgaattccgctttgcattgggaaagtcgatgccagtcctgtttggttatgtgacactgggtctggggtacggcctttacatgcacaacctggggttttctttttggtatccgacattgatggcgctaacgatttatggaggatcagttgaatttgtgattgccaatatgctagtccaacattttaatcccttgaacgtccttttaattaccttggtggtcggttttcgtcagtcattctatgccctatcaatgctcaaacagtaccgacatgctggatggcgaaagtggctgttaatctttggcctaactgatgagacctttgttattaaccactacaccaaagttccacaagaaatgagtcaagtaaaggttaatacatggatcacggtcttggattggggttattgggttcttggggccttcttaggcggcttcttgggaagtgtcttccagctccaagttaagggacttgattttgttatgacggccctattcattgttttggcattggatcaattcttacaagaaaagagtcatgttagttccattagtggggtcttaattaccatcattagcttgctggctgttggcaagacgtactttttgattgttaccttactcttgctggttgcggaatattactatttaacaaggcgtcatgcaaagggggatgattaa

SEQ ID NO: 2666 - DNA, 594 bp, Lactobacillus vaginalis
atgaagagagctgaacagcttgagaaaacacgacagtcaattatgagaacggcaactaagctcttcttgcaaaaaggcttcggtgaaacttctactcgtgatattgctaagcaagttgggattactcaaccggctctttaccatcactttagcgataaggaagtcctctatctagacgtgatgactaatttgagtagtaaggttcgtaaggatattaataaggtaatgcggaaacataagctaacacctaatgaacaattgtggcaaattacggttgtactgaaaaaacatcacccagtaagtatttacgatcaataccaccaagcagttagtttgctttcaaagagttcccaacaaaaattgaacatgattctcgcaatgaattatcttcagccaattgctgagtactttaagcaaccagaagttgaattacgtcctgatattttgccgcaagaagctgctgaattgttcttagctggaatttcaccgatttttggtacctaccagccaattggtggccataacattagtgacgatcaacgcgatcaattaattttggattgcattattagcggactttcaaaaacaaaataa

SEQ ID NO: 2667 - DNA, 1386 bp, Lactobacillus vaginalis
atgcaagaaggagaattgagaatgaaagtagttaaatttggtggtagttcattagctgatggggccagttatgaacacgcaattaagattattacgagtgatcctgaacggcgagtagtggttacttcagcccctgggaaaagaaatgcggatgatattaaggtaaccgatctcttaattaaatatgcacatgcaattattaagaatgacgatcaggaagccatggtcgttcgcaaaactattctagatcgctaccaagcaatcgcggattattttgatcttccaagcgggcaaatgcaaccgctagttgagcgactcgctaatttacctaatgggaattaccctaataataattacctgctggccgcttttaaggctcatggtgaacgactaaatgccgagttaatgtcattggttcttaaccgcctcggccatcctgcccggtttgtcactcccgaagaagtgggcttaaaggtcgctgggacgccaaataatgctactgtgattccagaaacttatgcacgattagccaacttttcttttagcaagcatgacattatcgttttccctggtttttacggaattacgcttgctggtcatattgcaaccttctcgcggggtggttctgatattaccggagcgattcttgcacggggactacatgctgaaatgtatgagaatttcaccgacgttgatgcaatctactccgctaacccaaatgtagttaaagatcctcaaccaattgcaaagatgacctatcgcgaaatgcgggaactttcctatgctggtttctctgtattccatgatgaagcgttaattccagcaatccaaggaaatgttccaatcaacgttaaaaatactaataaccctgaaaaaccgggtacactgattgttcctgaccactctttccaaccaactgatattattacgggagtcgttagcggaaagcactttgcggccttatacttacataaatacttactgaataaagaatccggattcactttacgcattcttgaaattctcgctcgccatgatgtttcatacgaacacatgccttcagggattgacgatattacaattatttttgataagaaggaactcgatgatgagctagttgatattatttgcaacgaaattcaggaagaaatcaatcctgatcgtttagaatggattgataactacgcaattacaatggtagttggcgaagggatgcgtaatcggaccggtgttatcaatgacatcttgaatccccttgccgaaaagcatatcgctgtaccaatgattaacatgggggcttcccgaattgcgattatgattgggacatataaccaagacgcagatgctgcagttcgtgcaatttaccaccgcttttttgttaactag

SEQ ID NO: 2668 - DNA, 822 bp, Lactobacillus vaginalis
atgacaagtgtagattggaaaaatgttaaagattattcggaaattatttttgaacgagctggaaagattgcaaagattaccatgaatcggcccaagaaaatgaatgcctttacgccagtaacaattcaagaaatgattgatgcttttacgatctgtcgtgatgatagcacaattggcgtgattatcctaactggagcgggtgataaggcattctcttctggcggtgaccagggagttcgtggaaacggtggatatgttggtccagatcatattgctcgcttaaatgttttggatcttcagcatctcattcgaattattcctaaaccagtaattgcaatggttaaaggatggtccgttggcggtggtaatattttgcaattagtttgcgacttgacaattgctgctgacaatgcaaaatttggccaaactggtccaaaagttgggagctttgatgctggttatggttctggttacttagctcgagtaattggtcataaacgagctaaagaagtttggtttttaaaccacttttactcagctgaggaagcttaccaaatgaactggattaacaaggttgtaccattggatcaggttgaatcagttacccttgattggtgtaatgaaattctaaaaaaatcaccaactgcattgcgctttatcaaagcagcaatgaatgctgatacggatggcctagctggtcttcagcagcttggtggagatgctacgatgcttttctacacgactgatgaaggaaaagaaggtcgcgatgcgttcaatcaaaaacgggatccaaactttgaccaatttccaaaatttccttaa

SEQ ID NO: 2669 - DNA, 1344 bp, Lactobacillus vaginalis
atgatcgagatctttaatcataaatattcttttcccaagctattgacctggggctttttagcgatcattttgcttggcacgattttgctatcattgccgattgcaacgcggtccggtcgcagtgatgatatcatgaccgcctttttcacatccactagtgcaacgtgtgtaactggcttaactctggtgccgaccgcgacttactggtctttcttcggtcaagtggtgattgcgatcctaatggaagttggtggactcggtttcatgacgtttgcggttatgatgtcgttgctgattcaccagcgaatgaggatgtctacgcgattgttaacccaagaggcgcttaaccttgatcacctttcacaactaaacgtggttaatttgatcatccgcttatcaattattattcaggtggcggggatgggattactctttattgatttttatccccgttatggcctaaaaaagggactatggtttagcgtttttcattctatttcagctttttgcaatgctggctttgatttaaccggcaatagtcttgagaactatgccaaggatccctacatgttaacggtaatggccgtattaatcattaccggttcctttggcttcttggtttggcaggatttgcttcaattccctaaacgccaccatttatcacttcatacccaccttgtcctttgtactggggcggtaatctttgtgatttcagttttagtttattttctgactgaacataacttaggccagtttagtagggaattatcctatccccaacggatatttaatacgatcttcatggcaataactccccggacggcaggactcgttaccatcccgtatacgaaactaagtgcggccggaattagtacgacaattattttgatgttcatcggtggtgctcccggttcgactgctggggggatcaaaaccaccacgattggtttgctgactcttcagagtatcgctactctgcgtggtcgtcgggacacggtctttgctcaccggcgatttacggacgaaaatgtctttcgggcattgacgctgctttttgttgcctttgcaattttgatgatttcgattctgttattagttgaaacacaagcacttccccggcacgattccttgacttacgttacctttgaagcaaccgcagcctttgggacaacgggaatttctcttgggatcacgcctagtctaaattttgtcggcaaattaattattatgtttttaatgtttattggacgggtcgggatctatacggtgatgtattcaatcctcaatgctcagccaaagcaacgggaataccgttatccaaaggaaggtgtcttaattggttaa

SEQ ID NO: 2670 - DNA, 921 bp, Lactobacillus vaginalis
cgaagctattggcaccttgatactttctggggatttgcgggaattaagcatacaactcaggaacacggttaccttttccacgacgaagaaacccgtaaggactctgcacaggttgctggtaagatttccttcaagccaggtcatcctgatgttgaagcatttaaattcttgaaaagtcttacggatggtaaagacgtcactcctcggcaaagtattccagcaccggctcaattctatgccgaattagttcgtggtgacgaaaacattgctgctttacggaaatactaccctaccgatgatgaactcttccatgatattgcaaaagcctatcacggtttaatcctggcactctatgatgcaggctgccgcgatgtcaagattgatgattgtacttggggaatggtcgttgatgatgaattctgggcaacaatggctaaagctggctttgaccgggaagcactcgaaaatacctacctgaaattaaacaatgatgcgatcgcggaccttccagatgatctaaccgtcactactcatatttgtcgtggaaattatcactcaacctgggctgctaagggtggttacggaccagtagccgatcaccttttcgctaaggaaaacgttcaagccttctatctcgaatatgactctgaccgtgcaggaaactttgaaccattagcaaaggttcccgatgacaagtatgtcgttctcggtttggtaacctctaagagtggcgacctcgaagatccccaaacaatcattgaccgaatcaaggaagctgctgaattccatccccttgatcacctttgcctaagtacccaatgtggttttgcttcaaccgaagaaggaaacatcttaaccgaggatcaagaatgggcaaagatcaagctcgttaagcaaattgcagaacaggtttggggctag

SEQ ID NO: 2671 - DNA, 921 bp, Lactobacillus vaginalis
atgattatgtatcgaaaaaaggaaggaacaaaaatgaatacccgcgatttacagtattttgttgcgttagttaaatataaaaattacacacgggttgctaaagaatttaaggtttcccagccgagcattacccaagcaattcaacgattagaaagggaatttaatacccaattagttcgtaaggatcgctttcaccgagatgaaatgattacgcgaagtgggttgcttctttatgaaaatgctgttctgattaatgacaagattgatttaacccgaaaggaaattgatcgtgctaacaaaaagcagatcaggtttggcttgccaccgattattgggaaattatatatttctaaaattgttgaggagttttctggtgacttgctttcccgtctccgaataacctcggttggttcccatgatctgcttaatcagttgcggaagggaaaaattgatattgcaattttaggatcgactgcgccgattaatgaggaagatatttttgctgagttagtagcaacacgcccgttcggaataattgttagtgagcaaaatcaattggcccaaaaggatgccgttcattttaatgaattagcagagcaaaagtttatcaactataatcagcaatacgttcatcaatctgcatttcaagcatattgtacttatgcccagattaagcctcagattgttgtttatcggttaccgaatgtttcttggattaaggaacttgtccggcagaataagggaatcagtctaatggttaaggatgccgcgacaaatgagccaggaatcaaagcattggatattcttgatccaattccagaaaaattttatatttcgatcgtaattcgggaagggtatgttcttagtgatgacgaacaagactttattcaacgagtaaaacaaattcagcttgataattag

SEQ ID NO: 2672 - DNA, 843 bp, Lactobacillus vaginalis
atgaataactgggaattctttaataataagtggttcttgcggatcacttctcttgttctggctctcttcctctttttctacgttaataatggtagtaatggctttttaagacaaaataccaggcagcatgaccagacgagtgccctgatgtctaacaaaaccgcggttatcaagatgccacttgacattacgaccgataataattacgttgttagcggctaccccaaaactgtccgcgtaaccgtaaatggtccttcagcgttggtaacaacaacttcaaatacgcaaaactttaaggcttatattgacctgactaacgttggagtaggaaagcaccgggtgaaagttaaaactagcggcttgaattccgaacttcacgcaacagtaaagccacagtatgtaacggttaatgtccagccacggaagacagttactaaaaaaattactgttcggttaagttcccattcactaagtaataattatcaggtgggaacgccacggactgatgttgatcatgttcaaatatctggatcccgcgaagaagtcaataaggttgaccgggttcttgccttcgtcgcagtgccaactaaggcaacgtccgatattcaccggttagtaactctacaagcggtggataaaaatggtcaaacccttaacgtggtaatcgagccaaacacaactaacgtaacgattccaattcatggtgagggcgataatactagtagttcagcaagcgataatgataatgcacagtcaagctcaagcagtagtcacgctagtcgtgcaagttcaagtgaaagcagttcatcgagcagtagctcacaagcaagttcaaatgagtag

SEQ ID NO: 2673 - DNA, 1026 bp, Lactobacillus vaginalis
atgttaaaaattaccatgttttcgtctgccgacaaggttgccggacaaggggtcggcagtgcttacttggaattaatccatctcttaaaaactcgctttgccgatcagtttgacattgcgattaataaatatcgaaaaagccagatcagtcattaccacacgattgatctgcccttttatttctcaacattttctaaaaagcggggacggaaaattggctacgttcatttccttcccgaaactttagagggaagcttacaaattccacaaccatttcgtggaatcttttatcggtacgtaatcgccttttataagcggatggatcacttagttgtcgttaatccatcctttattgataagctagttgcgtacgggattcctcgtgaccacgtgacttatattcctaattttgttgactcggataactttttcccggttgataaacaaactcggcaagaatatcggaaaaagtatcatctgccagcagacaagtttgtggttctcggaagcggtcagatccaggaacgaaaaggagttcccgattttattaaactggcccaacagaatcccaatatccagtttgtgtgggcaggtggcttttcgtttggccgcttaactgatggttacagtgagttaaaaaaagttgttgataatccaccgacaaatttgctgtttacgggaattgttagtcgaaaagaaattgcagaattaaataatgctgctgacttattcttacttccatcattcaacgaactatttccaatgtcagttcttgaagcattcagttgtggtacgcccgtaatgcttcgtgatcttgatttgtatcattcaatcattgatggggattacgaaccggcgaaggatgtcagtgaaatgcaaactaagcttgtagaactcacccataatccggaaagattgaattacttacgggaacgagcagttgaaacttcaaagcgttactcgaaagatcacttagcaaaagtttgggatcgcttttaccgtcaacaagcaaaggaggctaattaa

SEQ ID NO: 2674 - DNA, 1038 bp, Lactobacillus vaginalis
atgaatattactaaagtaccgtttggaacttaccaaaacaagccagttacaaagtatgttttgacaaatgatcacggtgtccaagcgggaatcttagactttgctggactattacagtcatttaaggtgccaaccaaggatggcggtaaggccgatatggtcttaactactgaaaaccttgatgactttactaacaatggtttttgcactaaccgtttaattggccgggttgccggaagaattgctgatggccaatttgaaattgatggtaaggaataccacgttgaacaaaacgagggtaaaaacacgcttcatggtgggactaatggtttctacagctacatttgggatgttgattctactaacgtcactgataacgaagcatccattactttaagtctcacccttactgaagaaatggatactttccctggaaagattcatgttaccgcaacctacacattagacaatgacgataacctgaccttgaagtttggtgctacatctgatgcagatactttgtttaacccaactaaccatacttactggaacatggctaaggcaagtgctaagacagtcaatcaattaaagctctatgtcaattccaagaaccacttagccgttgacgatggcaagatcccaactggagaaaagttagccaatgaaggaacaccatttgactttagcaccccaactcgtcttggcgatgcactcgaaggaatggcttcaactaaagaaaacgggtttgatgatatttgggaagttgaaccaagtcttaccaagccagttgccacccttgaagatcctgaaagtggtcgtaagatgaccctttactcagatcggaatgccctaattatgtacaccatgaactccgatgatccagcagtatacaaccacggtgaagttcatccccacttaggaattgcaatggaagctcaaaccctttcagatgctatccaccatccagaatttggtgacatcacccttcatccaaacgaggaaaagaactacacaattaagtggcacgtagaatactaa

SEQ ID NO: 2675 - DNA, 969 bp, Lactobacillus vaginalis
atgactgaaaagctaaatcagttaataagaatcttagatctggatatttcacctaaacagcgattaaagatggtgcttgatgatgagtttgctgtctcggtagatcaaaatgaatttctccaaattgctcccgcttatttaggattaaagatttctccgcgatcaccgttttttgttaaatttcgccaactagtaatggatgcttacccgacttctcgtggattgaaagaagatgaactcgggagaaaactccacctttttcggagttaccttgacttgttttatttgaattatattcatcagtaccccggtcaaaacgattttcagcgattattaaattttgctcacagacaaaaaatacaattagactacgagacagctagtaattatcacaaccgaaccagaaatggtgcctgttatcctcataatatgaaggttcaactaatgcgtaattcttggcggcttcgtaataatcccgcacgaatggttgaatttattattaatattgatcgaggcgagtttattagtgagtggaatacatataagctaactgaaaatggtgaagttgatagtgatctaacgcattactcaattgaagagttaggggaagttgcgaatactgaatcgtttaactatgggattccgcatggcggttattacgtttacccgcgttttcaacgaacccaccaattcttagatgttcaacagccacgcgacaatttggttcgtcaacgggcaaagaaaatttatcgggcgccaaagggatatcataacggtgggcagtttgccgacttaatcaaatcaggcggagttaaagatgcgaaagcttggcagcggattccgcatgattttcgcgcagaagtatatcaatcatttgttaaacatttagtaagttcaggaatgcctaattggggaatcaattattatctaagctcaacgatgcggtatcggcagtactctgtgatttag

SEQ ID NO: 2676 - DNA, 1431 bp, Lactobacillus vaginalis
atgagcgtcaagaaaatgagcagttgtactgcaatgttagttggtaaaaacgcgtcaattgatggttcaaccatgattgcacggaatgaagattattacgatggtgttaacccaaagactttccaggtatatcctgctaaggactatactggtgaacactttaagtcaacttataatggcttggaagttgacttggatggtcaaggctgtcgttttaccgccacgacaaacggtgacattaataacggtcggtgggatgaacaagggatcaacgagtataacgttgcgatgagtgcatccgaaaccgaaatgactaaccctcgagtacttggccacgacccgcttgttgaaaagggtgttgacgaagactcaatggtttaccttgttctgccattcatcaagagtgctcgtgaaggtgtccaacgacttggtcacttaattgaaacttacgggactggtgaaagtaacgggattgcatttagtgataacaatgaagtctggtactttgaaactgctggcggtcaccagtgggttgctcaacggattccggatgatgcctatgcaatttgtcctaatatcatgtgcattgaagaggttaactttgaagatccagacaactttatgtttgcctcaacaatccaacaatttgttcaagacaataatttaaatccatacccaggtagtttcaacttccggaagattttcggaactaatgacgaagctgaccaatattacaacaccccacgttcatggtatggtcaaaagctgtttacaccatctgttgaacaagaaccaaccagcttggacattccgttcatccaacgggcagaaaagaagctggctgttgaagatattgaatacttcctgtcatcacactacaatggcacaccatatgatccaaccggttcgtatgcttctggtgacgaaaaggatcaaaagaagttccgttcaattgccttagaccggaaccaaagctcatgcattttgcaaattcggaataacgttccggcagaatgtgccgcaattcaatggattaactttggcttctttgcgtacagcccatacgttccattctttacgaacattaatgcaacgccggcatcatacgatcacgctggcaacaaggttgatgacagtgcatactggctacaaaaacaattggaagtaatcgttgaacctcgttaccatgaatttattaacgaggtaaatgctttccgtgatgcttcacaaagctatgccgttaagcgggtcgacatgattaccgccattgcaaaaaccaagcaaggagatgccgttaccgacttccttaccaagcgaaacgacaagaccgcaacccacgccatggacgctaccaaggaccttctcaacagtcttatccaccaatccctcttaaactccaagttccagtttgagagaggggataattattaa

SEQ ID NO: 2677 - DNA, 522 bp, Lactobacillus vaginalis
atgaaggaaagagtaacagttccccgagaagaacaagtaaagtttatgcgagcggccattgctgaagcaaaaaaagcagcgttgctagatgaagttcctattggtgcagtagtgacctatcaagggaaaattataggacgcggccataacatgcgagaaaaatttcaggacgtgacttatcatgcagaaatgctagcaattatggaggcctgttcctaccttcatagttggcgccttgaagattgtgatctatacgttactcttgagccgtgcatgatgtgtagcggagcaattgtaaacgcgcgaatcagaaatgtcttttacggggcaactgatcctaaggcgggaacagtcgatagtttatatcatttacttggtgatgaccgattaaatcatcaggcttatgtgactgctggcgttcttggtgaacagtgtagtcaaatgttaaaggactttttccgggcagtgcggaaaaaacgtaaactggcccgaaaaaagaaaaagactagtaattctaaataa

SEQ ID NO: 2678 - DNA, 843 bp, Lactobacillus vaginalis
atgaacttctacattgttgataatgataacaacgctacatctcttcttaaagatattattgagaacgactttaataattcagttgttggtacaaccttcaatgctgaacaagcatttgaagatgttattcgcttgagtattgatgttatgtttgttaacccgtccctgtcacagattaacgggattgagctaattaagcgaattcaacaaagcaaccatcaccctcacttcataatggttagtcaggcattcgatcctgcaggaagaacaaacgcctaccgagccggagttgacttctgtatcgaaaagcccttgaacgttgctgaagtgaaaactgttattaaattaattggtgaaaacattaatatgtcaaaccgaatgttgcagatacttgatctggtcagtggagctgccaatcagaacacgactaatattaacttcaagagtaaggaaaaagagaacgtgaagtcaattcttcgttttctcgggatcacaaacggttctggcgcccaggacattacccgaattatcaatgttatgattgagcagggaatcacgtttgacaatattaactttcatgaaatttttcggtgtgacgatcatggtaaaaagattattcttcaacggattcgtcgtgacctcaagactggtctaaataaccttgcccatatgtgcattgattatccagaaaatgatattattttggaatatgctaataacctttttgaatacaagaatgttcataatgaaatgaaaattattaatggtactgcctcacgtggcggccaggtctcagtcaagcactttttcaacggtctagttcaagaaagtgctcaaaagtaa

SEQ ID NO: 2679 - DNA, 456 bp, Lactobacillus vaginalis
cagaaatgggaagatgccggattatcaaatgactttgttttcagtaaggtgataattgatccaaagatttgtcaggaagtaattcaacgtgttttaccggagttgaaaattgatcatatcaaactaccaaatagccaagaagagattaattttgctccagatgcgaaaggagtccgctttgatgtatttactcgggatacgaaaaataattgctatgatatagaaatgcaggttgcagatgaaaaagatctgttaaaacgagcgcgatattaccaagcgatgacatcacttgattcgtacgaaaaagggaaaaattaccaagaagctaataattcatatgtgattttcttttgctgctttgatccgcttggcttaggcttgcagcaatataccattcatcgacatgttgatgaaagtccagaacatattgcagacgatgggacacaattttcttaa

SEQ ID NO: 2680 - DNA, 363 bp, Lactobacillus vaginalis
atgagaaaaaagggaatgttacttttcggcgcgggactaatggctgggctctctagtacgttagggttcagtcacgcgaagaaaagtaacacatcggctgcgttaccgatattctatgctggtacttggcaatattatgatcatgaacgcaaccgaacccataaaattaccatctctccagaattaaaactgggaattgacaatcaagaaattcccgcaacagttcaactagttcgtgaagataaattagtttatctcgataaatttggctatcatattacaattcaagcaaatgatcagcgtccagtttcattaattgacgaagctgatgatcaagtctatacaattcaaccactaaaatag

SEQ ID NO: 2681 - DNA, 1731 bp, Lactobacillus vaginalis
atgtccacacttttgaatggcttggcggcgagcagtgggattgctattgctcctgcctacctattagtgggaccagatttatctgttaaccaacaatattcagcaaatgagaatcatgaggtcaaacggcttcatgattcttttactttaacgctgaatgaagttcagacaattcgccagcatgcccataaatcattggggaagagggcagcggcagttgttgatgatcagctggcaattttagatgaccggtccctccatgctgaaattcttaaaaaagttaatcgtgaccatttatctgcagaatgggcaattaagaaaactgcagatgagcaattaaaaattctcgaaaaaatgaacgataatgactatcttccgtcgcgagcaacggcaattaaggacgttactaaaagagtgcttagtcatttgatgggggttgaacttcccgatccaactcttttggatcatcgggcaatttttgtagctcaaaatattacaccaactgataccgcacagtttgaccggcgatttgttgccggacttgttactgatgacgggggtagaacctctcattttacaattatgagtaagactctatcgttaccagcagttgttgggaccgagaaggctactaaaataataaaaaatggcgatttactgatcgttgatgggattcatggcaaagttattgttgatccgtcagaagaggaagtagatcattatcagcgattagccgcccaatttgatcgcgaacaacaagagtgggggacattaaaggatgaacaaaccgttagtaccgatggccgccactttaaggttgttgctaatgtcggaacgccaattgatgtccttgatgctcggcaaaatggggctgaaggaattggcctggttcggagtgaattcttgtatgcgagtggtgatcgacttcccagtgaaaaagagcaaacacaagcttataaacaatttttaactgaaatgccagggcaacgagtagtggtccgcacgcttgatattggtggtgacaagaatctggggatgctaaagctgcctcaagaaaacaacccgttccttggatttcgagcaattcgaattggccttgctaagcctgagattcttcgtccacaattacgggcactccttcgtgcttcggtatatggacggctagcaatcatgtttccaatgatctcgacggttgaagaattttggcaagcacgaaaaattttggatgaagaacggcaacgactattaaatgagggagttcaagtagcagataacatcgaagtcgggatgatgcttgagattccttcaagtgccgtgatggcagatgcctttgcccgtgaggtggatttctttagtatcggcagtaatgatctaattcaatacctatttgcagctgatcgggggaatcctcgcgtggcctacctttatcaagaattacatccggctgttcttcgtttagttaagaaagttattgatgcagctcatgctgaaggtaagtgggtaagtatgtgcggtgagatggcaagcaacccattagcaaccccattgttaatggcgatgggattggatgaattctccatgaatagtagcagcattttgcatattcgctcattaattaatcaacttagtactcgtcaattacaaccgctagttcacaaggctctcaatgcgacaactgctgccgaagttgaacgattggttcgtcaagcagtccctaaagtgatcgaataa

SEQ ID NO: 2682 - DNA, 1776 bp, Lactobacillus vaginalis
atgaatcgacatccagattaccttctaaaccgggttaatgaaccggctgatattaaatcaatgtctcttgaacagctaaagcagttagcaactgaaatgcgtcagctggttcttgagcgggatgcagcaattgggggacacgttggcccaaaccttggaattatggaaacaacgattgcatatcattatgtttttgattctcctcacgacaaggttgtttgggatgtttctcaccaatgttatccgcataaaatgttaaccggtagaaagatcggctttatggatccagatcattatgaggacatttctggatatacttctcctgaagaaagtgtccatgacttttttgaaattggacacacttcgacgtccgtttcattggcagttggcctggcacaagcacgtgatttaatgcatcctgactccactgataatatcgttgcggtaattggtgatggctcgctaagcggtgggttagcctttgaaggattgaataatgcggctaagctccattctaatttgattattgttgttaacgataatcaaatggcaatcgataaggatcagggtggtctttatcaagggctgaaggaattacgtgatactaatggtaaggcagagaataacattttcaaattcatgggcctagactataagtatgttgctgatggtaatgaccttcagacaatgatcgatgcctttaaggaagttaaagatattgatcacccaattgtccttcatgttaatactttaaagggtaagggatataagccagccgttgaagataagatggattggcactggcagccaccatttgatattaaaactggtgaggttaagaagcaggaaagcactgaaaactatagtgacgcaatcttgactgagttaggacatcaaattgatgacggagtaccggtagttgctctaaatgcggctattcctggtgtctttaacctcaagaagttccaagctaagtaccctgatcactattttgatgtgggcatcgctgaacaagactccatcactactgcagtcgccatggcaactgctggtgcacgcccagttgtctttcaaaatagtacgttccttcaacgggcatacgatcaattgatccatgatatggctcttaatgatgcaccagtagtaatgattgtcagaggtgggacaattgcaacgaattctgctactcaccagggaacgtttgatatttcaatgatttccaacttgccaaacattgaatatcttgccccaacgaacgttgaagaattgatttcaatgttaaagtgggcccttagccaaaccgaacaaccagtgataattcgggaacccgaaaagaaactccttcacggaaaagttagtcaagatgattacagtgttattcattatgacgtagcgcgtgaaggtagtgaagttgctattatggctgttggtgacttttggcaattaggacttgatgtctgtgatcaactgcaaaagaagttaaatattaacgcaactttgattaacccgaagtccttaaccggaattgatcaaagttatctgcaccacctttcagaaaatcatgatgttgttgttaccttggaagatggtaacgttagcgggggctttggtgagactatttctcgttattatggacctaaagcaatgaaagtcttgaacttcggtgctcctcgtgaatttgctgataacgttccactagaagtcctttatgagtggtatcatttaacaccagatcaaattgttgatgacattgaaaaggttattcacgccctttaa

SEQ ID NO: 2683 - DNA, 750 bp, Lactobacillus vaginalis
atgggaaataatttgtcacaagaaatttataaattcactcaccagcgaacttctctttacggccttcttattatgatcgcgctaatgctttatagcagcattcctgcatacaaggttaaccccttcttgatcactcagggatttggggctattcaatggtgtgcgattattatggttgctgtcagtgctgattctatttcaatggaatatcgtaacaacacaatggtcacacttctttttaagagtaaccacccgtttaccatttaccttgctaaattgattactctagtggtttatgggattactttgttattggctggctttatttgctcactgattttgatgctgcttctaggaaataactattcgtggtctgacaattttcatggttattccctgattacagcgttagggtataactttctaggcgcttttatctacctactgtttaccatttctctctcactacttttggttatcttgttgaagtcaaattcaattgtcatcattattggccttgcagtcgattttttgggagctaatttttctgggctattaatgaatatccttccgaaacaattatgggcgtggaacccgcttaatatgattaacatcattgttcaactatctaatcaaagtgtaattaaaattacccatctcagtaattttgaattatttctcggtaatggttgctataccctactattcattattttgggactgtgggcctttaaaaactaccaaaaatag

SEQ ID NO: 2684 - DNA, 798 bp, Lactobacillus vaginalis
atgttaacgcttagttttatgcggcatgcctttgttgctagtacctttattgcaatagttagcggctttgttggtgtttttgttgttgccagaaacctttcctttttaactcataccttgtcggaaattggctttgccggaggagcatttgccgtctttattggctggccggtcttaaacggaatgatccttttcacaatgcttagttcgattcttgttggtcaaatgagtattaaagaatcccgccgtgaagcagtaacgagtgcagtctccgctctttttatcggcttgggaatcctttttctttctttaagtagtgcgaatgctagttcagcaactaatatcttatttggaagtgttgtcgggattaacctaactgaggtttggcaattaatatacctatctatcgttgttatcttaataatctttgcagtttaccgccagttaaagttcacttcgtttgacgctattggtgcacgagtaagcggacttaatgctgcactatattcagttattttcttaattgttttagcgctgagcgtgagtgtggcagcacaaatagttggttcgttgttaatttttatcttattaaccctaccggcagctagtgcgaaatatttcactcatggagttgctaagatgatcggtttagcgatcctcttttctcttttaggaacctggttggggctatttcttggttacttaactaattggccagttagtttctttattgcggtgattgaagttggaatttattgctgtgctctagttaaacaaaaacttagcggggcggcataa

SEQ ID NO: 2685 - DNA, 807 bp, Lactobacillus vaginalis
atgcggcaaaaagtaatgttcatcgttccctatgctttatggatcatcctctttgtggttgccccgttagcactgattttttatcaatcattttttgatattaatagccatttcacacttgctaattaccaggattacctaacatcgccaacatacttaaagatgaccctgaattccgtttggtacgcggctctaattacagtagtgaccctcgtgattagctatccgactgcttatgtccttactcaactgcagaatcgtcaattctggttgttaattgtcattttgccgacatggattaaccttttgctgaagacatatgcattcattggtcttttttcgcgaaccgggtcgattaaccaatttttacggtttgttggtttgggaagtcatcaactgcttttcactgacgctagttttatgttcgttgcggcatacattgaaattccgtttatggttttaccaatctataatgcattaatcgaaattaatccctcattgttaaatgctagcaaggatctcggggcgacttcttggcagacgttccggcgaattgtttttccattatcaatgccaggagtaaaggctggaatccaagccgtctttatcccttcgctctcccttttcatgatcactcggttaatcggtggtaaccgggtaattactttagggaccgcaattgaagagcacttcttaacgacccaaaactgggggatgggatcaacgattggggttgtcttgatcctggcaatgtttattgtaatgtttgttactggtgatacgcgtgagaaaggaggtcggcgttaa

SEQ ID NO: 2686 - DNA, 933 bp, Lactobacillus vaginalis
atgggaactcctgaatttgcagttccaattcttcaaagtcttattgacgcgcctgaatatgacgttaaagctgttttaacccagcctgaccaccgtgttggccgtaaacatgttttaaccccatccccagtgaaaaaacttgccgtagaaaaccaaattaaggttttacaaccagctaagcttagtggtagtcaagagatgacagagattatcgaactgcatcctgatttgctgattactgctgcttatggtcagttcttgccaacaaagctattagatgctgcacagatcgctgcaattaatgtccatggttcactattgcctaagtatcgtggtggtgcaccagttcaatattccattatcaatggtgatcgggaaaccggggttacgattatgtacatggttaagaaaatggatgctggtgatatgatttctcagcgagccattccaattgaacctgatgatgataacggtacaatgtttaagaagctgagtatccttggtcgggatctcttgttagatacgctacctgacttgattagtggaaatgttaaaccacaaaaacaagatccggaaaaggtaactttctcaccaaatatttcaagtgaacaagagaaaattgactatacaatgtcagcacagcaaattgatgataaggttcgcgggttgcgtcctgccccaattggtaacatgaagattgatgggcttcgaactaagatttatgatgtgacaccattgactgaaaaaactgaattggaaccaggtaaagtcgttcggattgataaacaccacctggttatcgctgctggtaagggaactacatatcaaattaatgagttaaagcctgccggtaagcaaaaaatgaacattacggcttacttaaatggtcaccaaaacattaaggaagggatgcaagtggtaaccgatgactaa

SEQ ID NO: 2687 - DNA, 1092 bp, Lactobacillus vaginalis
ttgcccggattattaaataagactaaaataaaattatactatttggcttttattatctggggtatgattatgaaaagattgaatttatttatatttttaatgttttgttcctttgggttattcttggtatcaactcagcaacaagctaatgcggctgcggtagataagcagacgcaaacacaacttcatgattatttaaaatcgcaccatattaatggtgtaatattggttaatggtaagggaagccaagcggttaccattgcaaacaatgaaactactaataagaagcagattgttaaggccaaccgactatttccaactgcttcacttcagaaaattgtgaccgggacggcaatttatcaactaacacagaaaaagcaattgggatgggacacgtccctaaacacttattttccgcagattgatggaagcgaagatatcacgattcgtgaattaatgaaccataccagtggcctcgttaacaatgatcgcccggcagttcctttaaaagggcaaaaacagcaaattacttatatgcttggacacatgagaaacgatcacgttcatacctgggattaccaggacgttgattatgaactattagctgcgattatcagtaagcaatctcattctagttataatgcttatattcatagaaactttgctaagccgcttcacctacaccaaattaaggatttctctgaagttgccaaaaaggaagttccgcaaccaatggatcccgctattgattggcatcaggtaactgttacgacctcttcagattttggggcagggaacctttttatctcaccaaataattactggaaatttatttacaattatgttttaaaggatccaaagatgatcaccgaattctatcaagaatcgcaaaaacaggaagttgcttattttggcggggtatattttgatggtgacattatccgtgctaacggtagtattccaggttacaatgcttgcgttatcgctaattacaagaccaagaaaatgataatgtttttctctaacaacatcgattatctgaccttaaagactgtatcagatgacttaatgcataactatatgggagcataa

SEQ ID NO: 2688 - DNA, 912 bp, Lactobacillus vaginalis
atgataaaaatgaaatcaacagactatttagtaaaaagtatcagcaaggatggcaagtttcgtgcctatgcggttaatgccagccaattagttgaaaaggcacatgaaattcatgatacctggagtgcttcttcagctgctttaggtcgaacactaattggaactctccttttggcaactgctagtctccaaggggaagcaggaatgaccgttaaaattcagggtgatggtccagttggctttattgttgctgatgggacggcacaaggaacagttaagggctacatggggaataaccacgttagcttgccagccaatgaaaaaggaaagatcgatgtttctggagcagttggtaaacacgggacattatccgttaccaaaatggcgcctggagataagaccccatataccggacaagttaatttagtttctggagaattaggggatgactttacatactaccttgctcaatcagaacaaattccgtcagcggttggtctttccgtctttgttaatcctgatgagtcaattgaagttgctggtggctttatgatccaagtccttcctggagcaagtgatgaagagattagcaagctagaaaagaaattgaaggacttaccactagtgtcagaaatgcttcgtgacggcgatactcctgaagatatcttgaaacgaatctttggtgatcaactgaaaatcttagaccggatgccagtttcatatcgctgtgattgcagtaaggaacgctttgctcatgccttggcaagcatcgctaaaaaagacttggaaaagatgattaatgaagatcaccatgccgaggcagtttgccaattctgtggtaagaagtacgaatttagcgaacaagagctgaaggatatttatgacaaaatggatcaagaagaatccaaataa

SEQ ID NO: 2689 - DNA, 798 bp, Lactobacillus vaginalis
atgaaaaatgatcaagaagtgatcccacggtatccttttcagcctaccttaaagattggtggctttgaaggaccgctcgatcttttgttacacttaattcgtcagtcaaaaatggatatttatgatattcaaattgagcagattactcaacaatactttgattatttacgggcaatgaagagtcaccaacttgaagtagctggtgattattttgtgatggcggcaacattaatgaatataaaaagtcgtttattgttaccacaaccggaagaagaggtagaggaatcagatgaagaagtagcggacccgcggcaagaactggtcgaacagctattagaataccaacgataccaaaaagcagccgctcatttaaaagataaagctgattttcgacaagctgaatataccaggccggcaatgcatgttcctactgaaatgattgctcagcacgttgaacctggggttacccttggacagcttcaacgagcatttgcagatgttcttaggcgacgtcagttaaccgcaccggttcatgagacggtagcagcggaaaaaattagtgttgctcaacggatgaaccaggtctttacaactgttaagcaagcagcaacgaggtttaatgatctatttgctggtcaatgtacccgtgatgagctagtaacaacttttttagcagttttagagttaactaagcatcaggcgatctctgttcatcaagacgagctattcggaccgattattttagtggagggatcaaagagtgaacaatatcgagccaacaaacctagccaagattga

SEQ ID NO: 2690 - DNA, 441 bp, Lactobacillus vaginalis
atgattggggttgctagattggcccagaatatggtaacggacattgcaacgaaagaacttggctttcgtgaaattggggttttccaatacaacgataaaaatgagagtaagagttcattaattgcccgctttgatgggatgctggcgggagttgaattgggcgatgtgatcgttttccaatcgccatcctggaattcagttgaatgggatacggcactccttgaacgaacccttatttatgacgggttaaaacggattatttttatccatgacgtgattcctttaatgtgggaaagtaatcgctatttgctggataagtgggttaaatattacaatatggctgatgtgatcattgctccatcccaatctatggttgatcttttgcgtcaacatggcctaactgtaaaaaaagttgttattcaaaaaatgtgggatcacatc

SEQ ID NO: 2691 - DNA, 1203 bp, Lactobacillus vaginalis
atggcaaaaatagcgatatatatgacgggaggaattgctctttataagggaattgaggtaattcgttctttagaaagggatggacaccaggttcgcgtggcaatgactgagtccgcaacgaaactagtaaccccttcaacgttacatgcactaacgcaccatcctgtaatgacgaccctatggaattataataattccccggttcctcacattgaacttgcagattggtccgattatgcaatcgtgttaccagcaactgctaatattatcggtaaaatggcgaacggaattgctgacgatgcggtatccacaacccttttggccacggcagctcctaaaattgttgttccagcaatgaataccaacatgtggaataatccagcagttcaacggaacgtggctcaactaaagcaagatggagtaacaattattgaaccagcagttggaatgcttgctgaaggttaccgggggaaaggacgtttaccggaacctgctgaaattatcagtcagctgcggtcgataattaagagttcaattaccggaattcttcgtgggaaaaaagtattaattactgctggtggaacccgcgaggcaatcgaccccgttcgttttattggtaatcgctcttcaggcaagatggggattgcaattgcaaaagcggccgcagatgcaggtgctactgttgaactggttcttggtcagatttcgattgctcagccagtaaacccgcaaattagcatttaccaggttggaagtacggaggaaatgcagaagaaagtcacggaactctttccggcagctgatattttaatcatggcagctgcagttgctgattttcgtcctgcacgggttgccaatcaaaagataaagaagcaggatgatcaagaacagttagaacttcaattagtgaaaacaacggatattttaaaaacggttgcggaaaagaaacgtgcagatcagttcgtagttggttttgctgcggaaaccgctgatttagtacaaaatgctaataagaagttaaaaagtaagaatgctgatatgatcattgctaacagtgttgctggcaacaatggtgcatttggcagtgacctaaaccaagtaacaattcttcaattagggactgagccggttcaatggtcaagaatgaccaagacagaagtggcaataaaactaattcagttacttgctaccaagataaagtaa

SEQ ID NO: 2692 - DNA, 1011 bp, Lactobacillus vaginalis
atgaaaaacttaaaaacggctaaatttaattattgtgctcaagcagaatggttgttactaattgctgacttattaaggagcggtttttcccttcgccatgcgattgaattttcaggagcaattttaaaaagacaccaaattctttttcaggaaattaatttagcaatgcaagatggcaaatcatttgccgagtgtttaaaaccgcatataaagccaaatttatattaccagttgctttttgcagaacagcacgggagcttagaagaatgtttgcaagaaattggcaagttgatgcttcatcaagaaaaacaacgccaaaaattaatgacattattacagtatccgttaatcttactggggttattggtgagtttaatggtaacgttaaaaatatttgtttttcccgagctatctcaatggggaacgggaaattcacaaaactgggctgattattatttattagaaataattgcctatcttagtggaggaatattagtgacaagcttactagtaggactgcggtggctgaaattagatcagttacaaaggatcaatgcattatgttccttaccagtaattggcaagtgttaccaactgttttacggctactatgtggtcactaatcttgcaatgatgattcgccatggattaacgattaaagaaatttgcgcaattgttagtgaaaactctgagcaaagcttcttatcaatgctaggggaaattacaagaactgcggttaaccagggatacggattaacggaaccgtttaggcgtgcacaatttttaccgggagaactaaaaataattgtggcgaaagggtcgaccttatcagatctaggtagtgatttaacagctttagctaatattttgtttactcgattaactagacgaattgagcgattattagcacttattcagccaattatttttagcatgattgcgttaatcattattggactttatttacgactgttgttgccaatttactattcaatgcagggggtggtttaa

SEQ ID NO: 2693 - DNA, 777 bp, Lactobacillus vaginalis
gtgagcaaaaatcaaccacgaaacgctcaagccggtcaacgacaaaaagaacatttaaaagaagaccggcgtgaagcgggaaatgcaattagtaagcataacttaacaaagaaaaatgaagaattcgtttttcaactaaataagcaacttgaacgtcaaggagttgctaaagaaaagcgtcctgaaattattcaagatactattacccaacttaaagaaggacaaaagacgggtaaaactgccaaagcgttattcggaaccccgacagaatatgtcaaaaatctaaaggacccgaagaaaaataatcagcctaaccacatgagtaagcaatctattaagctacttgcccttgataatatgctgatcttcttcagtatctttacctttatgttcgggttaatgttctggatttcaccagcagcaatgaagatgacccactatggtagtagtggtctcttggcaattgtgctagtatccgtatctggtggtctcttatatggctatgtggcttcccagctacaaccagtcaagaagaacggtaagtgggttcaagcaaagccagtttggttccggatcttaaccgttgcttttggattagttgtttggctagccgtttacatggcttccagcttggtgcctaatgtaatcaaccctcgattaaatgcttgggcctacattatccttggtgtaattgcctttgctggagatattgtcttccggcgcaagtaccacattaccggtgctttctacggcaaccggaataatcggcgtaagtaa

SEQ ID NO: 2694 - DNA, 1854 bp, Lactobacillus vaginalis
atgaacaaaaaggaaggcctagtaatcaatcgggctcagccgcatcacgtcacaggaattgacggcttacgaacaattgcagtgctgggagtaattatttaccacctgctgccaacccaattaaagggtggctttcttggtgtcccgctattcttattaatctcaggctattttattacttaccagttcagtaaaaagattgaacgtggtgatcgacttggattaaagcatttttatgctaagcgcttttaccgtctttatccagttttaattacgatgttagtgttaacaattgcgtacattacgctgtttgctcatgagcttttgcatgacattcggcaaatctttgttactaatatcttgtgggtttacaattggtgggagatttatcatggacaatcatactttgatcaattcgctaaccagtcaccatttactcacctttggacattgggggttgaagcacaattctatgttctttggccgattattatatttctcttgtttaaggtgttcaagaagcgttcaattgttcaataccttgttttggggttggcgatcttgtccgcaattgaaatagctgtcttgtaccatcctgagacgcttaaccgagtttactatggaactgatacgcgggctttttctctcttgcttggctcatggcttggcttagtctggccgcttgatcggctaagtacaaaggttacggtaactgcttcacggatattagatggtttaggagtcatcgctttaattattactctatttggctttataaccttagatgggcaatcctcattcacgtaccatgggggaatgttcttttatagtgtaattgggaccgtcttactagcaacgatctttcacccgggaagccacatgaatcggtggttaaccaacccgttctttagttggtgtggtcagcgatcatacggaatttacgtctatcagtatcctgttcttgtattttatgaacgggcaattgatgttggtatccacccagttattagtgggattgaagaattagcattaattgttattatcagtgaagtttcatatcggttgattgaacaaccgcttgctaagcgtcggttaagtgatttccattggcaaaaaattaagtttaataattggaaacaagcggcaacggcaacagttgttttgttaattgccggtacagcaggctacggtctctgtcaacctaatgttcaaccaaaaaagacaactgttcagaagcaaattgaaaagaacgatcaattaactgaaaaacataataagcaacttagtaagggcaaaaatgttgaaacaaccaagattagcaccgttcaaaaagagtaccagctaagcaagactgaaattaagcaggcgcaaaaactgaaggttactgcagttggtgattcagtaatgcttgacgcttctaatagccttcaacaattgatgccacatgcttacgttgacgctaaggtgggacggcagggctcacaaacgccgaaagtccttagtcagttaaaggagagtggtcaccttaaccagatcgttattttgaatttagggaataatggtgccatggatcagaaaacaatcgataatattctcaagactattgggaaagatcggcaagtttactgggtaactccgcacattccatcaaagagttggcaacaacaggttaataaccagatccaggagattgcgaaggagcaccataacgttcacctagttgattggtatgccgcaagtaatggtcaatccggctggtttgcaaaagatggcgttcacatgaataagcagggaaataaccattatgcaaaattgattacgaaaactattttgaaggatcaacggggtgaatag

SEQ ID NO: 2695 - DNA, 1389 bp, Lactobacillus vaginalis
atggaattaaacaacgaatttaagcggcacctggaacggggtcgcttttttgataaaaacgatcgggtagttgtggcagtttcaacgggagtagattcaatggtcttgttagcattgttgcaggagcttcccgcaagcttacgtccccaaataattgttgcccatgtcaatcaccggttacgaaagcagagtgaagaagaggaacaatttattcgggattattgtgaagatcaccggcttaaattagttgttcatcactggccattgacagagcacccacagaacggaattgaagaagctgctcggaaaatgcgttattgcttttttgctcaggtaatgaaagatgaacaagcaacgattttactgacagctcatcaccaaaatgaccttgcagaaacaatgctaatgaaacttactcgtggtggccaattgcaccagttaatcgggattgaagagaagcggccttttgcatcagggacgcttgaacgacctcttttaaactttcccaaacaacgattgcgtgaatatgcggttaataatcatttgaagtggtacgaggatttaactaaccgtgaactgactgttagtcgcaatcgctttcgtcatcaagttattccattattagaaaaagaaaattccaacttcttagccgccttaagcaactaccatgaacagttagaattagcggttgaacttgaaaatcagtttgctcaggaacagttagcaaagcttagtaataaggaaggacatctggatataaaagcactatgtcagttgcctctcgctaaggaaagactggttttagtaaagtggttggagaaaaacggggtgttaggactgaaacggggattcgttgaacaggtactttcagatattaataatcgtcatttaccccaaattaagcgtcgagttacccctgatttggtcctatttaagaactattctgagctatttgtaaaaaatgttaatcaatcgctacaaaaagttcaaccttccataaattctgtggtaaaattgggccgttggtattcaattgaaaacgattatcaaatcgccgttgctaaagagaagacgttctttaatcaaggggaacactgtcaagaaatgtggttagcgcctgaacagttaccattaaaagttcggcggtggcgagaacaagatcggctgccattaaagaatggcggtcaccaaaaagttagtcgggttttaattgaccagaaagtaccgttatcaaaacgtaatcaacagctagtaattgttgacgctcaagatactgttgtctgggttgttggtcgcaagtggggatggttcactcgtcccggtgactacactactcggtggcaacaactatttattggcaagcgcgatttaaagaggagaaaagaatga

SEQ ID NO: 2696 - DNA, 1833 bp, Lactobacillus vaginalis
atgcaacagttatcaatgctaattattatgttagcggcacttattatcccgattgcgatggcacggtttaaggtttctagtgttccgaccgccgttgcagaaatcgttgcggggatcctcctggggaagagtgcctttaatatcgtccaggaaacgtcttcgctgacgctgctttctagtttaggggtaattattttaatgttcctctctggaatggaaattaactttgacctctttaagaaagcgcccggacagaaaaagcgtgatgctaaatcaccagtttcgattgcggtacttagctttacagcggttatcattactgcctttatcttgggagtcatcctgtacttcatggggttattctccgatattctcctggcaacgatcctcttttcaacgattgctctgggagttgttatcgcgacccttaaggaaaaggaaatccttggtcggccaatggggcaaacgatcctgttgaccgctgtcctcggtgaagtgatcccgatgctggcattgacattctatgcctcaatctatgggcataatgcaggccgcctttggttgatcgttctcctgttcttggcagcaatcattcttttgcgccggttccgtcagccatacgtttggtttaataatgtttcgaaagccacaacccagcttgatattcgactggcctttttcctgatttttactctggtaacggttgccgaatcagtcggggccgaaaacattttaggtgcctttcttgccggaatggtaatgaagctcttagaaccaagcgaggcgactcaggaaaagctgacctcaatcggttacggcttctttatcccgatcttctttatcatgacgggtgtccggcttgatttgaaatcgttatttgctaataagactgcattggcgttgattccgattttggttgcctgctttattatcgctaaattgccaacaacattgatttaccggcggcggtttaacgcccggaactcatttgctggtggctttctgaccgtgacgacaattaccttagtattgccatcgctgcaagttgccaagaaccttcacgcaattacgagtacccagtcggatgcctttattttagcggctgtgattgtctgtgttctggcaccaattgtctttaactcaacctataagctgaataaggaagatttggttaaagagcgagtggtcatcgttggtgcgaacaccttaactgtcccagttgctcagcagttgtcccataactggtatgttgtgcggatgctgaccgataatcaggataactacaagaccttcaacagcgaggttaatgatctgaagtatattgaagagattgatgagcaggcgcttgatgcaggaaagtactttgatactgacgtgatggttctaggattccgcaatgataacaagaattatcaaatggccgttttagcaaagaaacatggcgttaagcgggttatcgctagtgtccagaacccgaaagtatcaacggaccatattgatgagcttaaccgacttggggtagaaattttcaatagtttcgtagtccaaaatagtgttctgcgttcgctaattgaatcgccatcggtctttgaaatgctgatgagtgctcattcaggattatttgaagtgacgattcataaccagcgctatgttgggattgaattacgaagcctgccattcatcgatcaaattacggttagtcgaatttaccgcaagcataagccaatttcgccaagcggggatactgttcttgaatatggtgatcacattctttacaccggaccgtatgaaattgttaatgaagtgcggaaacggcttggtcgtcgtggttaa

SEQ ID NO: 2697 - DNA, 1233 bp, Lactobacillus vaginalis
gtgagcaaagcaaaaacaaacactgaaatgatcgctgctcttgattacttagagaaagaaaagggaatcaagaaggaaattgttattgaagccttagaacaggctttggaactcgcatataagcaaaattatggtgaaaagaacgttgaagttgactttgacggggttactggtaatatcaaggtttatgctgttaagacgattaccgataacgaagacctggttgaggaagatgacaacgagtatatgagccttgctgatgcgcggaagttgccacatggtcaaggatacgatgttggtgatgagattcgtgaagaagttacaccacgtgattttggtcgaattgcagcccaaacagcaaagcaagtggtaatgcaacggttacgcgaagaagaacgcaagatcatctataataagtacaagacttatgagaatgaaatcattaccggtgaagtttctcgtgaggacaaacgttttacttgggttgaccttggtgatggtgttgaaggtgccatgggttaccgggacaagatgcctaatgaacactaccacattcatgaccggatccaagtttacgtttcgaaagtaaatgatgatcgtcatggcccgcaaatctttgtcagccggacagctccagaattattgaagcggttattcgaacgagaagttccagaaattaaggacgggacagtcttaattgaaaatattgctcgtgaagctggggatcgtgctaaggtagctgtttattctaacgatccaaacgttgatcccgttggtacttgtgtcggccctcgtggttcacgtgttcaggcaattgttaatgagcttgatggcgagaacatggatattgttgaatatgttaaggacccggctcaatttattgctaatgccctcaacccggcagaagttttagacgttatttttaatgaaccggaagctccagttactgaagaacaaccagaagaaaattcaactgatgattctgtaacggagactagcgacacatcaactgaagcagagagtactgaagaagaaccggtcgcaacaactgaagagcgttcatgcacggttgtagttcccgatagtcagctctcacttgcaattggtaagcggggtcaaaatgcccggttggctgctcgattaacaaagtataagatcgatattaaaccggcttctgagatggaagacaatactgatacactcgaagaagaaactgacgcttcagaagattaa

SEQ ID NO: 2698 - DNA, 975 bp, Lactobacillus vaginalis
atggatttatttgatgaaattgctgcaaaggtaaaggggcaagacaaaaccattgtcttccctgaaggtgctgacaaacgaattttaggtgctgccgttcgtttaaagaatgatgacttagtagaaccaattttacttggctcaaagagtgaaattgaagcaacagctaatgaaaataattttgatattactggtttgcaaattattgatccagcagcttatccagaagcagacaagaaggccatgtttgatgcacttttggaacggcggaagggaaagaatacccctgaacaagttgaaaagatgctggaagacgttagttactttggtaccatgcttgtatacatgggcaaggccgatggaatggtttccggtgcggttcactcaaccggttcgaccgttcgtccagcattacaaatcattaagacaaagccaaatgctcaccgaattagcggggctttcttgatgcaaaaaggcgatcagcggtacatttttgctgattgcgcaatcaatattgagttagatgcggacaccatggctgaagttgctgttcaaagtgccgaaactgccaagctatttggaattgatcctaaggttgctctccttagcttctctactaagggatccgctaagggagacatggttaccaaggttgccgaagctacagaaaaggttcacgaaatggaaccagaacttcctgccgacggtgaaatgcaattcgatgctgctgttgttccttcagttggtgagttaaaggctccaggttctaaggttgccggccatgcaaatgtctttattttcccaagccttgaagccggaaatattggttacaagattgctcaacgttttggcggctttacggctgtgggcccaattcttcaaggcctgaatgctccaattgctgacctttcacggggatgcagtgaggatgatgcatacaaggtggccattattacagcagcccaagcattataa

SEQ ID NO: 2699 - DNA, 1350 bp, Lactobacillus vaginalis
atgactaaattcaccccacaaaatgcgcgggaattagcttttgcttctttagagcgagttcgtaaaacaaaggcatattcaaatcttcaagtagacgaaacgcttcgtcggcatgaactaaaacccgcagatcaacgtttggtaacgacaattgtctacggaacgcttcaacaccagcttaccctagaatattggctaaaatcgttgacaccaggcaaacagctggatccgtgggttgaaacgctcttactaacagcgttttaccaatataactatttagatcgagttcctaattgggcagtgaccgatgaaacaattaaaattgctaagcgtcgtgggaatccgggaattaggaagtttgttacgggagtccttcattctgcattacgaaagggtgttcctgatttttcgacaattaagccaattgcaaaacgattatcaattgaagcgagcgttcctcaatggttagttgaaaagtttattgaagaaaatggcgtgcagacgacaaagaaaattctacaagcgattaatgaacctgctcatgtttccattcgagttaatactaaaaagagtagtttagaaacagtaaagcagcagttactagatgaaggtattgaaacggctgaaagccaagttgcggtcaatgctttggtcgtaacatcaggcaatatcgttaattccccattgttgaaggatggagttattacgattcaggatgaaagtgccatgctagcagttgaaagtatggatcttcatccacaatttaaggtgcttgatgcatgtgcagcgccaggcggcaaaaccgttcaaatagctgagcagctttcatctgatcagggtggtaaagttgttgctctagatattcaccaacacaaagttcgtctaattgagaaaaatgctcaacgaatgggggtagaaggcgttgtgaaaccgatagcgcttgatgcccggaaggttaacgacaaatttgctgatgaagaattcgatcgaattttagttgatgcgccatgtagcggaatgggattattacgacgcaaaccggaaattcgttatacgaaaactgctcatgatagtcagcagttacatcaaattcaattagcaattttaaatgcggttgccccaaaactgaaaaaaggcggtataataatttttagcacgtgcacaattttaactgaagaaaatgaacacaccgttcaagaattccttcaggcacatccagactttacgctggagcgaacagttacaaaacgtgctcttaaggacgatcgagattcggcaactttaacaattctgccgagtgattacggttccgatggcttctttattagttgccttaagcgaaatctgtag

SEQ ID NO: 2700 - DNA, 720 bp, Lactobacillus vaginalis
atggatcaagtaacagttgaccaaggcttttgggatcttttcccagacgctcaagtaaatattttgtacgcagacggaattaataatcacgataacgatgagaatgtaacagaacgacggcagttactccataatgctactaaggaagcccaaaagtttttgacgaacgaaactttccgtttgaatccagtgattgaccagtggcggaaggcttaccaacaattcaagaaaaagaagggtgcgcgtgcatcagtcgaagcactattgaagcgagcaaatcagggacgaacttttgagccaattaacccgctagttgatgtttacaacagtgtttcaatgacatatggcgttcctgtaggtattgaagaccgggataagattgctggtgatatgcaccttgggattgcaaaaggcggcgaagcgttcgattcagttggtgatggtaagaacgagccagcccttgaaggtgaagttctctggtacgataacgatggtgcagtttgccgttgcctgaattggcgtgacggtgaacggacaatgctgacagaggactctcaaaacgtggttgccgtaattgaatcagttaacgctgaacaaatcaaacgcgctaatgaagcaatggaagaattatcaaagttgattcaacactactttaatgttgagccaagccaggtcttccaccttactaaggataacccgacagcagtggtaccaaagtaa

SEQ ID NO: 2701 - DNA, 1959 bp, unclassified Clostridiales
atgttccatcgaccgggagccctttttgatttctcttgctcggcggaactcaattccgcctgcgccaaggttttcctccggaaaacgcttgtgacgccgcacttgcggcgggcgctctttcgatactattactctttttcaaaaggagatcactctatgaaccaggaaaacatccgtaacttctctattatcgctcacatcgaccacggcaagtccaccctgtccgaccggcttatcgaagcctgtggggcggtgtccgccagagagatggagaatcagatcttggactccatggatctggaacgggaacggggcatcaccatcaaggctcgtgccatcaccctgcgctacgaggcggacgacggggagacctacatcctgaacctgattgacacgccgggtcatgtggacttcaactatgaggtcagccgcagcctggccgcctgtgaaggtgctgtgctggtggtggacgccagccagggcgtggaggcgcagacgctggccaacacctatctggccattgagcatgacctggaagtgctgccggtcttgaacaagatcgacctgccctctgccgatcccctgcgggtgaaggaggagatcgagaacatcatcggtctgccggctatggacgcgccggagatctccgccaaggcgggcatcaacatccacgcagtgctggaggacatcatccagaacgtgcccgctcccgccggggacgaaaacgctcctctgaaggcgttgatcttcgactcccagtatgactcctaccgcggcgtcattgttctgatgcgagtcatggaaggaagtatcaagaccggtatggacgtgaagatgatggccagcggggcagtctacaaggtggtggaatgtggccatatgctgcccatcggtctggacccctgcggcgagctgcgtgccggtgaggtgggctacttcaccgcctccatcaagaacgtccgggacaccagcgtaggcgacacggtcaccagcgtagagaatccggcggcagaaccgctgcccggctatcgtcctgcccagcccatggtctactgcggcatctacaccgaggacggcagcaaataccccgacctgcgggacgccctagaaaagctccagctcaacgacgcctctctgagctttgagccggagtcctctgtggcactggggttcgggttccgcgtgggcttcttggggatgctccacatggaggtcatccaggagcgtttggagcgagaatttgacctggatctggtcaccaccttgcccagcgtcatctatgaggtcatcaagaccgacggttccactgtcttcgtggacaacccccacaactaccccgacccgggcagcatttccaaggcgttggagccttttgtgaacgtgtccatcatctcgcccaacgagttcgtaggcaacatcatgcccctctgccaggatcgccggggacagttcgtggatatgcagtatctggacacccacctggtggagatccactacaagatgcctctgaacgagatcatctatgacttctttgataccctgaaagcacacaccaagggttacgcttctttggactacgagctgtctgactaccaggagagcaacctggtgaaggtggacctgctgctcaacggcgaccaggtggacgctctgtcttttattgtccataaggataaagcctataagcgtgccagaaagatctgcgaaaagctcaaggataacatcccccgccagctctttgaagtgcccatccaggccgccatcggcgggaagatcatcgcccgcgagaccgtcaaggccatgcgcaaggacgttttggctaagtgctacggcggcgacatcactcgtaagaaaaagctgctggagaagcagaaggaaggcaaaaagaagatgcggaatcttggtacagtgcaggtgcctaccgaagccttcctggctgtcctcaagctagatgagtaa

SEQ ID NO: 2702 - DNA, 1386 bp, unclassified Clostridiales
atgcgaaacctattatccctgctcctggcctgcctgaccgccgtcaccctcaccggatgcggtctcaagtccggagaagacctatatcagctgcccaaggcgtccgcggaatatgagagcttgcagacctgtctggaggacatcctggatcagggtctggagtactccgcccccctcaccggctccaacctccagtccgtccagctcaccgacctggacaacgacggcaccaacgaggccatcgccttcttccgggacagctcggcagaaagtcagtccttgaaactctacatcttccggcaggtcgagccgaatcgctacgcccccgcgttggtcatcgagggcaacggcaccgccatcaactcggtggtggtctgccagctccagggcggcgcggactccatgcgggaactgctcatcagctggcagctctcccccaccgtctacgccctgtccgcctactccctggacaactacagcctgacagagatgctcagcagctccacctacaccaaatacactgtggacgacctgaatcaggacggcaacgacgagatcgtcctcatccagctccacagctccgaccaggacagcaaccgggcggactactatgtggcgcagggcggcatgatgacgatgcacaacagcgtcttcctgtccaaaaaactcagttctatcgaccgggtcacttgttctcccctgcccaaccggcacaccgccctgtacgtcaccggttccgctctggcgcccaacggtgaggccagcgcctccacggttatcacggatattttggccatccgcgaggacgacctgaccaacatctccatgggcaagggcgagctgaacagctcgtccaccctgcgcagcaaccagacccaggagcaggacatcaactcggacggcattgtggagatccccatcccctccctggtggagagctatgggcagtccgccgggaaggagaaattctactccctccactggcagcagtacgacatctccggcgccttccacatggcctgcgtcacctatcacaacaccaacgacgggtggtatctggtggtgcccggccactggacgggacacatcagtctgatgcggacggagaacacgtccagcctgacggtggagcacagcatcgtgttctactaccggggcacccagcgggacacccctgtccccttcctggccatctaccgcaccaccagcagcgaccggcagacccgcatcgaccgcgctcagaagagcggccggttcgtcctgcgctctgacccgggtaccatctactcggcggagtttttcgactgtgactgggactgtgggctgacggaggacacgctgaaggagcagttccatctgatccagccacactggtccaacagctga

SEQ ID NO: 2703 - DNA, 1614 bp, unclassified Clostridiales
atgtcagtcaaacatatctttgtcaccggaggcgtggtttccggcctgggcaaaggcatcaccgctgcatccctaggccgcctgctgaaacagcggggtctgcgggttgccctgcagaagctggatccctatctgaacgtggacccgggcaccatgaaccccatccagcatggcgaagtattcgtgaccgacgatggtgcggagaccgacctagatctggggcactatgaacgcttcgtcgatgaaaacctgaccgtcaactcctccgtcacctccggcaaagtctacaccgctgtcctggataaggaacgggatggggagtttttggggcgcaccgttcaggttatccctcacatcaccgatgagatcaagtcccgcatctaccgtatggaaaagggcgagccgaaggacgtcatcatcaccgagatcggcggcaccgtaggcgacatcgaatctctgcctttcctggaagccatccgtcaggtgggccgggaactgcctcccgaggatgtcatgtacatccacgtgtccctcattgtcaccatccccggctccggcgagcagaagagcaagcccacccagcactcctgcaaggaactgctgaccatcggcatccagcctgatgtcatcatgtgccgggcagaccagccggtgaccgaggacatcctgaacaagatcagcatgttctgcaacatccccgtggagaacgccatccccaacctgaccgcccccatcctctatgaagtgcccctgatgctggagaaggaaggcctgggcaacgtagtctgtaagcacctgaagctgaacgtgcccgcccccgacctgaccgagtggaccaagatggtggaacgtgctaaggccaccgtggacggggaagtggagatcgctctggtgggcaagtacgtggagctccacgactcctacctgtccgtggtggaagccctgacccacggcggcattgagaacgacgtgaaagtcaagatccgctggatggactcggagaacgtcaccgaagagaacgtggcagaggtgctggacggcgtcaacggcgttatcgtccctggcggcttcggcgcccgcggcatcgacggcatgatctactccatccgctgggccagagagcagcaggtgcccctgttcggtatctgcctggggatgcagatgtccgtggtggaacacgcccggcacttggccggcatgatcggcgcacactccagtgagttggaccccgaaaccccttatccggtcatcgacctgatgcccgaacagcgggatgtggataaaatgggcgcgaccatgcgtctgggcgcgtatccctgcaagattctgaacaagaactccaagacctatgaggcttacggcgaagaggtcatctatgaacgccaccgccaccgctatgagttcaacaatgactaccgggaagccctcaccaacagcggcctgtccctggtgggcgtgtcccctaacgacaagctggtggagatcgtggaagatatgaaccacccctggttcgtgggcgtccagttccatccggagctgaaatcccgtcccaacaaggcacaccccttgttccgggagttcatccgggcgtccaaggaaaaccgagacaagtga

SEQ ID NO: 2704 - DNA, 1287 bp, unclassified Clostridiales
gtgaagctctttcccgccattctgctgagcggtctgctggcgctcaccttagccggctgcactgcacagagcacctctggcggcgtctctgctgccgcatctgcccttgacgcaaccgcaaatgcttcccccattcagatcaaactcaaccgggtgaaggatgagatcaaggcggaggacggccatgtgctggtctcctacgcctatgaccgtcccacggtgatgatttccggcaactctgccgctcagtccgccattcaaagcagcttgaacgctctggtggacaaggatttgacctatgtaaaaggagacctttacgccatcgcccaaggaaactatcaggcgctgggcaaggacgcgaccccctgtacctccgagctgaacctgaccgtcacccgcagcgatgacacagtcatcagcctggtggccgatgagatccaggacgccggcggcgcccacggcagcgactggcgcagcggctggaactacgacacggagaccggtcagctgctgaccttccccgacctgggcaacgggttccgagaaaaggccaccgagctggtgtccgagcaggccgcgttggaggtggactctctcttcgatggttatcaggaaaacctgagccacgtggtgctggacggtaccgaggacgcccagagtctgtacggctttgacgccaccatcgcgcctaccttttatatgactgacgaatccatcacctttatctcacgggagtacgaattgcagccctacgccatgggtgtgttggaattccccactccttattcggactatggttccatcctgaaggagcactacctgcccaagggctacaccgccaaagaaagcgccaagcaggacgccgacctggccgccagctcggacgatggcaatactaccagcaacgacgcctctgcggactccaacgggcaagccctggccaaatcgggaaagctccagggaaaaggctggacgctgaccatccccaccaactggagcaagcagatctatgtggccagcaccgccaattcggtctctttctacgagaaagggtgtcatgatgccatgggcggcggctggctgttctccatccagtcctatcaagacaactcctaccagcagctgccggactacgagctgctgagcatcgaccggaccaccacctatgtggtggtctaccccactgacgtgcagttcgagggcgctgaccaaaagagcgctcagcgctacagcgctttttccgggcagatcgaaaaggtgctgaaaaccttcgccctgtccagctaa

SEQ ID NO: 2705 - DNA, 894 bp, unclassified Clostridiales
atggccttggaagaaaaactctatcagtacctggatcggctcaaagcccgctaccccttggtggcctttatcgtggacgtcatcgaggtctacctggatcgccgggtctcccgcagctccgctgagctggcctattacctgctgctgagtgtcttccccatgctcatcatggtcatctccgccctgggctggctgcatctggagaccaacgcagtcatcagcttcctcaacaccgtcctccccgcccagatcatggagctgttctccgactatatcacctacgtcctcacccaccaatccaagggactgttcctggccggactcatcatgtccatcaccgcctcctccgctggcttccgcagcctcatgtccatctccgccgagatctacggacggcgcaccttccgtggggtgtggtacttgctgacctccctgattttctccgtcctgctgctggtgatggtctacgggtctatcgccgtcgtcctgacaggcaactggttctttaaatggttccggatgcgcttttccatgctgccgctgcccaagaacctgcgctggatgcgcctgatgattctcttcggcgtggccctgctggtcctggctctgctctaccgggtcaccgccccctggagtcaccagcggccgccggtgctgaagggtgccttcctcatctccatcctgctggccgccgcatccggtctgttctccatgttcatcagcctctccacccgctactccaccgtctacggctccttggcctcggtcatcatcctgatgctctggctctacctgtgcggcaacatcgtcaacctgggcaacgtgctcaactacgtgtggtggcgacgaaaacaggggctgccggtgcgcttcctattagaaaagcaattgtaa

SEQ ID NO: 2706 - DNA, 888 bp, unclassified Clostridiales
atgacctatggcgacgtggaagcctttttggcgattttacgcaacgggagcatcaccgcggcggccgaagcgttgttcatcacccagcccgccctatcccgaaaactgaaatccttggaacaagagcttggtgtgcgcctgttcgagcgcgagcagggacggcactacctgactctgacagccaaggggcaggaatttgcccctctggcggagaagtggatgtccttacaccgggagaccgagtactataaatccggcgacgcccaagccaccctaaaaatcggcgccgtggactccatccacacctacctcctcccacccgtcctccaagcccagctgcggctgcacccagaggtgcgcctgtccttgacgctggtgcatgactggacggcgtacagtgagatctccgagcgcaagtgtgacctggcctttgtggacgccatctactatgccgctcacgtccgttccacccccatgtttcgagaccggatgctggtggtcagccgcacacctttctccgcaaactgtctctctccctcctccctgaactgtgccaatgaggtgtgtgtcagctggacaccggagtttttggagtggcatgattactggtatggcatcagcaatccccccaaggtcagtgtggataaaatgtctctgatggaatatttcctgaccgaaaaggacgcctgggccctcatgccctccaccgccgcccgtgcgttggtgcggcgcggggagtatttctgctgtgagctggacgccccgcctcccgaccgcacctgttacctgctccaggacagcgtgaacaccacaccgccggcagaatccttcttggagaccttccggcaggtgctccgctccaaccccgacctagagtcgctcatctga

SEQ ID NO: 2707 - DNA, 1191 bp, unclassified Clostridiales
atgaatcccattaaggaggaagttacgatgaaagatacctatatttccgattccgttctgtacgtcggcgtagacgacaagaccatcgacctgttcgagagccagtacgtggtgcccaacggcgtctcctataactcctatgtcatcatggacgacaagatcgccatcatggacaccgtagacccccgcaagaccaccgaagggctggccaacgtagagcaggctctggcaggccgtctacctgactacctggtcatccaccacatggaaccggaccatgcaggcagcatccagcagctggcggagaagtatcccgacatgaagttcgtctccaaccccaagctgtttgctatgatggaacagttctatgacttcgacttccagagccgcaaggtggtcgtcaacgagggcgacaccctggaactgggtcaccacaccctcaccttcgtcatggctcccatggtgcactggcctgaagtcatggtcagctatgagagcgccgagaagatcctgttctccgccgacggctttggcaagttcggcgccctggacaccgaggaagattgggactgcgaagcccgccgttactatatcaacatcgtgggtaagtacggcgccaacgtcatggccctgctccagaaggcagccaccctggacatcgccaccatctgccccctccatggccccatcctgaaggaagacctgggtcactatattggcaagtacctgacctgggccagctatgaaccggaagacgaaggcgtcaccatcgtctacggctccatccacggccacaccgccaaggctgccaagctcatgcagaagatgctggaagaccgtggccagaaggtagagatcttcgacctggcgcgggacgacatggccgaggccatcgagtgcgcctaccgctatgacaagctggtcatcgccaccgtcacctatgacgccggcgtcttccccgtggtggaggactttgtctatcacctgaagctgaagaactaccagaagcgcaccgtgggcatcatccagaacggctcctgggggcctgtagctggcaagaaggtcaaggagtccctggagaccctcaaggacatcaagatcgtcgatcccatggtcaccatccgctccgccctgaaggagggcaacctgaccgctatggaagccctggctgacgccctggtggcaaagtaa

SEQ ID NO: 2708 - DNA, 1362 bp, unclassified Clostridiales
gtgcatgagaacaaagaacggctgacccgcatcggcaacgccattttatccgcctcccggaacgagctctacctgtccatgcgcttcttcgacctggcgctgagcggtctgggctaccagatgaacctgaacaccgccaccatcgccaccgacggggtgaacatcctctacaaccccacctacttgcagcggcagtacgtggacgacatgatccagctcaaccgcacctacctgcacatggtgctccactgcctcttccgccaccccttccaccggggcgaccgagacccggcgttgtgggacgtggcctgcgacattgcggtggagtccattttggactccatggaggtcaagacggtggccatggtcatccccctgttccgagaggacgtgtacgaccggctgcggcaggagtgcccggtgttcagcgccgagcgcatctatcaggcgctggaacggcagatcatcccctgggaggagcagctggacttttacaaatacttccgccgtgatgaccacaagttctggggcgcccagcaggaggaggaacagcagggcagcggtcaaggggacggcgcgggcgaccaagaccagtccgatgagcggcagaaggagctggaggacaagtggcaggacgtgtccgagaagaccaagaccagcatggagaccttcttcgcccagcacggcaaggaggctgggacgcttctccaagcgttacagatcgagaaccgggagcgctacgactaccggcggtttttgcagcgttttctgaccctccgggaggaggtgcaggtggacccggactccttcgactacgggttctacgcctatgggttggagctgtatggcaacatcccgctgatggagccgctggaataccaagagactcggaagatacacgacctggtcatcgtcatcgacacgtcggactcctgccgggaaggggtcatcgccgccttcctgtctgagacccgcgccatcctgaaccagtccgacctgttcttccagaacgccaacctgcacatcatccagaacgacgcggcagtgcaggtagacacggtgctccacagccgggaggagtttgaccagtttaccaagacgtttacggtgaagggctacggcggcaccgacttccggccggcgttccaatatgtgaaccggctcatcgaggaggggcagctcaccgacctgaaagggctgctctacttcaccgacggttgggggacttatcccaagcatcgtcccccctacgacgtggcctttctctttttccgtgaccaatatcaagataccaacgttcccccctgggccatgaaggtgatcctggggccggaggaactgacggaggtgcatccgcaatga

SEQ ID NO: 2709 - DNA, 741 bp, unclassified Clostridiales
ccggaacgagtagttgccgccgctgccaagctgtgctactccaaagtgggggtgaccaacctgctggacggcctgacgccggagaagagcgccagctttttgcggatgctcagtgacctgggccatgccagccctgtcgagcacgcatccttcaccttcggcatcgaaggggtgtcccgctctctgctggcacagatcacccggcatcgtctggcgtcctactccgtccagagtcagcgttatgtgcggttggatgatttccattacgttatcccgccggaagtggaggcagagccggaagccaagaagctgtttttggaggccatggaacagcaggcacaggaatacttaaagatcgccggtgcccttcagcggaagcatcaggcggagctgatggcacaggggctgtcggaaaaggcggccaagcagaaggcggagaagctggccaatgaggacgcccgttttgtcctgcccaacgcctgcgagacaaaaatggtggttaccatgaacgcccgcagtctgaaccacttcttcaacctgcgctgctgcaaccgtgcccagtgggagatccgtcggctggcggaggagatgttcaagctggtctatgcggttgcgcccaacttgtttgccggtgccggtcccagctgtgtggcggatgggaaatgtcccgagggcaacatgagctgcggcaagtgcagggagatgcaggagcagtaccggaagtggaaggaagagggctga

SEQ ID NO: 2710 - DNA, 1434 bp, unclassified Clostridiales
atgaaggggggaaagtggaagggctttcaatttcgccccagcgagaacgtccaatcccagttcgccctgtcctatctgctcatcattgccgccgtcctcatcctgctcaacacctatcccctgctggcctgtcagaccctggtgttccaggccaagcagagcatcctgaccgaagcccagatgatcgcctccaatctggcagagctgggcgagctgggggaatcgggggtggaacaggtgatgacgttggtgggcgacggcaacctgacccgtatcgtggtcaccgacccggacgcccaactgctctacgacacccaggagagcgcccgtccccaccggtacgccctgttccaggagctgacccaggcgctggacgggcaggacgtctatcacgcctcttttcgggacaacgccttccgcagtgaggccgccgtgccggtgacctattgcgggaacatcatcggcggggtctacctttataaatatgacacggagcaggcggagattttattggggctgcaatccaacctgcgcaacatcaccctggtggtctgtgtcttcgccgtgctggtcagcgtcatcctgtcccggatgatgacccggcggatgaacgatctgctggccgccatccgggccttccactcaggcagcgacactcaccccatctcggtgaagggtaaggaccagctggccaagatggcggacgagttcaaccagctcaccgagcgcatccaagagacagacgccatgcggcgtcaattcgtagcagatgcctcccatgaattaaagactccccttacctccatccgcctcctgtccgactctatcttgcaggacccggagatggaaccggagctgatccgagagtttgtgggggacatcggccgggaggcccagcggctgagccgcatcacggaggggctgctgtccctgactcggctggatcggggcattcaggagcagtccggcgtcatcgacgtgtccgggcaggtgcgctatgccatccacctgctgctgcctctggcggaggccaatgacatcgtgctccactctcagttggagtccaactgcctggcgctcatctctggggacaacatggctcacatcgccaacaatctcatcgagaacgccatcaagtacaacgtccccggcggcagtgtgtggatccggctggccattgaccaggatgacgtggtgttcacggtggaggacaccggcatcggcatcccgccggaggagcgggagaaggtctttgagcggttctaccgggtggacaaggctcgttcccgggaggcgggcggcaccgggttggggctgtccatcgtacgcgacacggttttgcaggccggcggctccattcgcctgaccgaggggagcgccggaggcgcttgcttccaggtaacgctgccgctggcacaggaggacgtgacatga

SEQ ID NO: 2711 - DNA, 1326 bp, unclassified Clostridiales
atgaattctgccaacgaaatttggatgagtatcacaccggtcctgcaagagaaatacaccgccatcgcctttaccacctggttcggccaggtggaagcgctggatttcaagatggaccagctgatcttgtcctgtccctcggatttcaaagcgaagatgattcgagaccgctttcaatccgacatcgaacagatcctccacgacctgttcgccgctgacatcaaggcggtgatcttggggccggaggagacggccgcctaccgctcggaggcggcggagcagcctgcgcccaaccagaacatcctgatgggcagtgaggagtacacttttgaccggttcatcgtgggttcctccaaccggtttgcctacaacgccgcccaggcggtggctaacgacccggggaagagctacaacccgctgttcttatatggcgagtccggtctgggcaagacccatctgctttactccatctatcacaccatccggcaaaatcattcggactatcagatcatctacatcaagggcgacgagttcaccaacgagctgtccgaagccatccgcctacgcagcaccgatgccttccgtcagaaatacagggacaaggatctgctgctggtggacgacattcaattcattgccggcaaggaacagacccaggaggagttctttaacaccttcaacaatctgtacgaggcgggcaagcagatcgtactaacctcggatcgtcccccatctgatatgctccggctggaagatcgtctgcgcacccgattcgaatgggggttgatggcagacatccagccgccggactacgagacccgctgcgccatcatcaagaacaagtccatcctgctggggctgaacctgccctcggatatcatcgagtacatcgcccagaacatcaccgccaacgtgcggcagctggaggggaccatcaagcggctcatggcttatcgggacctgatggacagcgagatcaacgatgagaacgcctcccgggccattcgggagctgatccggaacaaggatgaattcgtgccctcgccggaggtgatcgtggaggagaccgccaagttctacgacctggaccccaagaccatcatgggcgagagccggaaagccaacattgtcctggcccggcaagtctccatgtacatcatccgttccatcaccaaccagtccctgccggaagtgggtaaattcttcggtcagcaccatacgacagtcatgcactcggtggagaagattgaaaagatgctctccacagaccgggagctgaaggaagtcattcgcgacatcaaagccaatgtaaacgaccgcttttga

SEQ ID NO: 2712 - DNA, 1278 bp, unclassified Clostridiales
ttgaaaccgagtaaatggattccgaagatcgtcatggtcgccttcttcatcggcgccatcctctatttcgtcggctatgccgtacagaccttccgcaacgacatcaccaccgtcaccgtctacgagaccggtgtggaggactccatggacaccacaggcttggtggtccggcaggagacgttgctggaaggcagcggcgagcggatggaggtgctgccggcggaaggggaatcggtggccaaaggcgaggtcatcgcccggatctacaaggatcaggcggcgctggagcagcatcagacgctcaaggccaagcagaccgagcgggaagcgctgcaatacgtgctgagccactccaccgagtcctcggacacggcggagctgagcaagcgggtcatcgcctcgctggaatccattcgatctaccgtgtttcatgaggatctgtccgatctatccgaccagatccagtcggtgaagaacatgatctaccggcaggattatacttacaagggcagcgaagcggtgaccaaggagatcaaccagctgagcaaggagatcaagaagctggagaaggaggcaggcagcacggtctccaccatcaaggccgagcaggcggggaccttctccgccatggtggatggctatgagacggtgctgaacccctccaaattgtccggcctgacgccggcgaagctggatgagctggtcaagaaccggcaggaggttaaggaaggcaagtatctgggtaagatcatcaccggcggcaaatggtactacgcggtgaccatgaatgtggcggatgtggagcggatgcatgaggacatgaccgtgaccgtgcgctttgacaacgtggctggcgagcagaccatgaaggtggagaccatcggggacaccaagggcgatcagaagcaggtcaccgtggtcttctcctccacccgccacctgacggagacttccctgctgcggcagcagtcggcggcagtcatctacgagagctaccggggcttccgggtgcccaaggaggcgctgcggatggaaggggataagtactacctctaccgggtcagcggcgcgcagctgcggaaggtggaagtggagattctgtgccagctggacgactactatgtggtctggcagggcaagtccgtagacaaggacggcaaatcggtgcagcagagcgcactggagaaagcaaagcagattcgggacggcgacaccatcgtggtgcgggggatgaacctgtacgacggaaaagtagtgggcagccgtgcaaagacataa

SEQ ID NO: 2713 - DNA, 1272 bp, unclassified Clostridiales
atgagtgaaaagaaaaaaacagcagcacccaagtccgcagaggaaaaggaacagaagaatcgcatcccggagcacatctccggcgcggaaaaactgaatgagctgattgagcgagggaagaaaaacggcaagctgaccaccaacgagatgatggaattggacggggtggagctggacagctccacgctggatcggttttatgacatcctggaaaacctgggcatcgccctggtcaccgaatatgagctgcctgaggcagacgagcacgccaccgaggagatcgacaacctgaaaggggagatcgaggagctgaaggcggaggaggtggaccccaacgccatggcggagagcttcggcatcgacgacccggtgcggatgtacctgaaagagattggcaaggtctccctgctgacccaggaggaagagctgaagctggctaagggcatgtctgatggcagcgaggcacagaagatgctggacgcctgggagcgtctgcaaaatccggaggcctatgaggaagaggagccggaggacgacctggacgaagaggaaaacggcgatgaacccgacctggaagcggtgcgcagcttgacccccaacgacatcaaggcgctgaaacggaaggtgcgctatggccaggactgcaagcagcggctggcagaggccaacctccgtctggtggtctccatcgccaagcgctatgtggggcgtgggatgctgttcctggatctgatccaggagggcaacctgggcctcatcaaggctgtggaaaagttcgactacaccaagggctacaaattctccacctacgccacctggtggatccgccagtccatcacccgtgccatcgccgaccaggcgcgtaccatccgtattccggtgcatatggtggagaccatcaataaggtcatccgcgtctcccgccagctgctccaggagctggggcacgaccccacgccggaggagatcgcggcggagatgaatatgtccgtggaaaaggtgcgtgagattttgaagatcgcacaggaaccggtctccctggagacccccatcggcgaggaggaagactcccacctgggtgacttcatcccggacgaggacgcctccgagccctccgaagccgcctccttcaccctgctgaaggaacagctggtggaggtgctgtccactctgacccccagagaggagcaggtgctcaagctccgcttcggcatcgaggacggccgtacccgtaccctggaagaggtgggcaagcagttccacgtgaccaga

SEQ ID NO: 2714 - DNA, 756 bp, unclassified Clostridiales
atgaaactgatttcctggaatgtgaacggcctgcgtgcctgtttgaaaaaggggtttgaagatgtgttctactttttggacgccgacctattctgtctgcaggagaccaaactccaggccggacaattggagttggatctccccggctattatcagtactggaattacgcagaacggaaaggctattccggcactgcggtcttctccaagcgggaacccttgtccgtccggtacggcctggggattccggagcacgacacagagggacggctcatcaccctggaatttgacacgttctatttcgtctgctgctacacccccaacgctcagaacgagctgaagcgcatcgactaccggatgacctgggaggaggatttgcaggcgtatctgcaggcgctggacaaggaaaagccggtggtgtacgccggtgacctgaatgtggcgcacaccgagatcgacctgaaaaaccccaagagcaatcggggcaaccctggtttttctgaccaggagcgggagaagatgacccagctgctgtcctccggttttacggacaccttccgccacctctatcccggccgcactggcgcctattcctggtggagctaccggttcaacgcccggaaaaacaacgccggatggcgcattgactatttcatcgtctcagaccgactggcgcctcgcatcaccggcgcggacatttacccggagattttgggcagtgaccactgtccggtgggtttgactttagacttataa

SEQ ID NO: 2715 - DNA, 852 bp, unclassified Clostridiales
atgaatcagccaaacatcagccgattgatcaaaaacctggagagtgagttcggtctgaccttattctccaggacatcctccggcatggtcgccaccagggacggggaactgttcctgatgcaggcggaaaagctggtaaagaacacggacacctttgagcattccttcaagaacagcgaggagacctccacgtcattccgcatcgctttaccccgaggcagttacctgaccaaagccttcgcccggacgttgaacgcggtcactgaggatcatcccatccaggtcaccttcaacgagaccaacaacgaagaggtcatccaatgtgtctctgcccaggggtatgacgtgggcatcatccgactgcccattgagttggaagggaactacaaaaagctgttggctgaaaagcagctgaagttccaggagatcatggtcttccgttttgtggtggccatgcacaaggaccaccccttggccaaccaggaatatgtccacttttccgatctggtgaattacaccgccttggtgcacggtgacaaccatttcctcaccttctctgactcggagaccgataaattataccgcacccacttgtataagaattccatctctatctttgagcgaggcagtcagttcgacttcctccgggacatccccggcaccttcatgctcatctcccccctgccccaggagctgctcaacgcctatgacctggtgcaggtcaagctgccggacagcgagatcgggttgttcgaagatctgatgatcacgcggaaggatcgccgctacacggattttgtacaagagctgatgcaccaaatactcgaagtagagcgtgaaattatggtatag

SEQ ID NO: 2716 - DNA, 1650 bp, unclassified Clostridiales
atgtctatattggatgtgttcgcgctgttaggcggtgtgggcttgtttttgtatggcatgatggagatgtccagcgggttgaaaaatgccgccggtgacaatctgcgcatcatcctggaaaaagcgacccgcaaccgtgtcgtgtccgtgttggtgggcatcttggtgaccatgatgattcaaagctcgtcagccaccgacgtcatggtcatcggtttcgtcaactccgggctgatgaatctgtcccaagcgctgggggtcatcatgggagccaatattggcaccacggtcaccgctcagctgaccgcttttgatttaggctcatacgcgccgatgatcttgttcgtcggtacggtgatgtatctgttcgtgaaaaaggcgaccatccaatacattggggaagttgtcatgggctttggtatgctgttcgagggcatcaccctgatgaagcaagccatcatcccaatgtcccagaccgagcagttcatcgccctgttggagggcttgtccaacccggcggcggcgctgatcttcggcgtcctctttaccgccctggtgcaaagctcctcctcctccatcgccatcttccaggcttttgccatccaaggcatcctggactaccacaccgtggtctacctggccatcggcgccgccatcggttccgtcacccccaacctgctggcctccctgaccaccaaccgagagggcaagcgcagcgcggtgctgaacctggtgttcaacgtcatccgtgcggccatcttgaccatcctcatcaccatcttcccccagatcttggacttcatccagagcctggcgccccacgacattggccgtcagatcgctcacacccacaccatcttcgccaccctggccgtgctcatcgaactgcccatgtccaatatgatcgtcaagatctcccgtaagatcatccccatcctgccggaagagcaggaaaaggacgagcgctatcgcctggtctacctgtccggcctggagaatatccctcccgccgtggcgctgaagcaggcgcagatggagatcgcccggatgggcagattcgccgaggaaaacctgcagatgggcattgactgcgtcctgcagcgggatgagagcaaggtcaagccggtcttcgagctggaggctgtggtggactatctggacagccagatcacccaggcgctcatcaatatgcgctatcaccacatgaccgataaggagctcaaccgcctgtcccacatgatcctggccgtgtccgatatcgaacgcatcagtgaccatgcggagaacctgacccagtatatgctgcggctgaaggagcagaagatcgacctgtctccggaggcggaaaaggacctaatcgagatgtgccaggccgtcatggccgccacccatatctccatggaggtgttcgccaacgacgactttgaccgcctgcaggaagcagagtggctggagaacgtggtggacgacttggaggagcagtgcgtggacaagcacatggaacgcctgctcaacaacacctgcaacccggtctgcggcgtggtgttctcggatatggtcaccgacctggaacggtgcgcggaccatgcggtgaacatcgccttcgcgctgagcgggaaatcggaaaaacaccatatcgtgaaggattga

SEQ ID NO: 2717 - DNA, 1332 bp, unclassified Clostridiales
atgaatgtgaaaaacgtagaaaaactggaacacagcatggtccgagtgaccatcgagatcgacgcggacgaatttgacgctgcggttgaatctgtttaccgcagaatgaagaaccagctcaacgtccccggtttccggaagggcaaggctcccagaaagctggtcgaaaagatgtatggcgccaacctgttctatgaagatgccgtcaacgagatctgccccaaggcagtggaggacgcagtggatcaggagaatctggagatcgtcggctatcccgaaatgcacgtggaatccgtcggccccgaaggtgtcatcgtcaatgctgacatcgccgtcagacccgaagtcaccgtcgagaactacaagggcatcgtcgctccctacaaggacgtcgaagtgaccgaacacgacgtggacgtggctctgactccctatatcaaccgcgcaaagaccaccgtcgaagtggatcgcgaagcggctaaggacgacaccgtcgtcatcgacttcgtcggctacaagaacggcaaggaatttaagggcggcaaggcagaaggttatgagctgaagctgggctccaactccttcatccccggttttgaagaacagctcatcggcaccaaggccggcgacgagaaggaactgcacctgaccttcccggcagactatgcccagaaggagctggctggtgctcccgtggtcttcaaggtcaaggtcaacaccgtcaagaccgtgcaggaacctgtcctggacgacgaatttgccaaggacgtcagcgaatttgacaccctggaagccctgcgcgatcacctgcgggaagagtgcaagaaggaccaggaagagcgcgctcagaaggaatttgagtatcgcgtgctggagaagctggtggagcagactgaatttgatattcctcccgcaatggtggactatgagagagacagaatgctcaacgagtacaacagcaacttcgcaagcagcggcatgagcctggagcagtacatctccatgaccggcgctaccgtgcagcagttcttggactccctgcgtgaggacgctctgctgaacatcaagaagggcctggtgctggacgccatcgcaaagcaggagaacgtggaagtgaacgacgaggatatcgacgcttacgcaaccaagctgggcgaaggctatggcatgagcctgaccgagatcaagtccgctgtgcccaccgataacctggaaggcggcgcccgtgtggataaggcagcccgcatcctctacgatgcagccatccatggccctgccgaagaggaaaagaaggaagaagctgcggaaaagaccgaggacgcagcagaataa

SEQ ID NO: 2718 - DNA, 609 bp, unclassified Clostridiales
atggatccagcgttacagagcgcgttagtggaagccgtccaatcggtggccacccccacctgggcagacatcgccacggccctcatcgcctttctcgccctcatcggaaccatcgtcatggcgttcctgcaaaaccgcatcgccaagcagcagaccatcatcgccgccaagcaggcggatatcgccgaccagcagaacaagatcgcccttttcgagaagcgctacaccctctacgaccaggtggggcggtgtaccaccttcgccttcctgctggaggagttcggcactctggagaactttttgtggctgtacaaggccgccttcgccgacacgggccggaccgatcacaatgtgtccctggacgacgtgatggagctgaaccggaagactctggctgtcacgaagcaggcggactatctgtttggcaaggagctgagcgagaagattgccgggttatgtgcccgcctggtgctgttggtgtccttgatggagttcccgcaggccgaccaaacggtctacgcggatcggaaggagagcttttgcacctacgccagagaatttgaagaacaacatatgccactgctggaagcccggctcaatatcagataa

SEQ ID NO: 2719 - DNA, 768 bp, unclassified Clostridiales
atgaaagcatttcagtacacttgtaaagcaaccctgggtctgcacgcccgtcctgccgccatcctggctacggagtgcaccggtttgaagagtgcggtgaccattgaaagcaacggaatgtccgcatccggcaccgacgtgctggccatcatcgccttgcgcgccaagaagggcgacgttctgaacatcaagatcgaaggcactcccgaagaggaggagcacgattatgcaagactgcaagaggtcttcgcccatatcatccccacggacaacaacctgaacgtgttgaaggtggccttctacggcaccaaatcctatgacaagatcttctttgaagagctggccaaggacaagggcgagggcgcttacaactgcgatatcacctattttgacagccgcctgaccgccgagaccgtccacctgtgccgtggctttgacgcggtgtgtatgttcgtcaacgacgaggcgccccgggcggtggtggaacagatgaagaagaacggcatccgcctcattctgctccgctgcgccggcttcaataatgtggatctggacgccgctaaggaatgcggcatcaccgtcctgcgtgtgccggcctattcgccctatgcggtagcggaacacgccatggccatcctgcaggccgccaaccgccgcatcaccaaggcgtacaacaaggtgaaggacaacaacttcgccctgaacggtctgctgggcaccgacctgcacaacaaggtggcgggcatcgtcaccactggccgcatcggc

SEQ ID NO: 2720 - DNA, 1479 bp, unclassified Clostridiales
atggaaagagtagcagaatccctaaagagcaaagtgatgtcggcacagcaggcagcacagttcatcaagtccggcatggtcctgggcatcagcggcttcaccagcgtgggcagccccaaggcagtgcctctggctctggtggaatccggccatgcaaaggatctgaccatcagcgttggtgcagcagtcagcgatgaagtggacggcgccatggttcgtgccggtctggtctcccgccgtttcggccaccagtccaacagcgacctgcggaaggcgatcaacaatggcacgatcgagtttagcgatctgcacatttcccacctgcccatgaacatgaagcaggactgcggtctgcacaccaatgtggcactgattgaatgtaccgctgtcaccgaagatggcctgtacctggctgcttcctgcggttcttctgacgcagctgtcgcttccgctgacatggtcatcgtggaagtcaacactaccctgccggaacagctgatgggtatgcacgacattttcgagattggtctgccccccgaggcaaagatcatccccatcaccaagcccgatgaccgcattggcaccccctacgttccctgcgaccccgacaagatcgtggccatcgtgatgaccgaccgggaagatccccctcagaagttcaagccctccactcctgtcaccgacaagatcggcgaaaacgtcatcaagttcctgaagggcgagatcgaagctggccgtctgcccgcaaatcccggccccatccagtccggcgtcggctccgttggcaacgctgtcctgggcggcctggcaaagagcggcttcaagggtctgaacatgtacaccgaagtcatgcaggacgccgcactggatctgctggatcagggtgttgtgaagtttatctcctccagttccatcgcgctgactgcggattatcgcaagcgcttctatgataacatcgactactatcatgataagatcatcgtccgtccccaggagatcaccaaccatcccgagactgcccgtcgtctgggtctgatcgccctgaacactcccatcgaagtggacatctacggcaacgtcaactccacccacatcatgggcaccaagatgatgaacggcctgggcggcagcgctgacttctcccgcaacgctcgtatctgcatctttgccaccgaatccatcgccaagggcggcgacatctcctgcatcgttcccatggtctcccacgtggactccaccgaacatgacgtggacgtcatcgttaccgagcagggcattgctgacctgcgttggaagtctcccaagcagcgggcaaaattgctcattgaaaattgtgcacatccggattatcgtcccatgttgcgggaatactttgaacatgcctgcaaggtctccgctggtcagcacactccccacgacctgaagctggctctgtcttggcaccagaactatctggaccacggcaccatgaaaaagtaa

SEQ ID NO: 2721 - DNA, 1203 bp, unclassified Clostridiales
atgaaacgaaagaaatccaccggcgggaagaccgtccggcgtctggtggcgctctctgcggcagcggctaccatgtggacggtgggtcagacggcagactgggaggcggtggcccacagcggcacccagctcatccagagcgcggcgtgggcggaacgactggtgcgacaggagctgatccggccgttggaggaggggagcggcgtggtgctcaccggctgggaggagctggtggtggcccagtcgcctgccttgctgctccagcgggcggcgctgaaggaggagggcagtttggactccgaccttgggcggaccaagcgggaacaggcggcggagacagccaaggaacggaagcaggaggagtcaaaaaccacccaaaagaaaacgaccaaagccaagcggaaggagaagaagtccaccaaagccaccaagaagctggacacatctaagttaaaggtagctgacatcaacttggacaaccacaccaaaggcatccaggtgaatctcaaggactactttgacaaaaaacttaacttaacgttacagccggccaagaaaggccctcagattttgatcgtccacacccacaccactgaggcgtataccaagggaaagaaggacaaatacgaggagaccgacccagcgcggacgctgaacaacgattacaacatggtgcgggtgggggaagagatgaaagctgtttttgaggacatggggctgtcggtggtgcacgacacctccaagcacgactaccccagctacaacggctcctacgcccacgcgctgaacagcattgagaaatatgtgaagaagtaccccaccattcaggtggtgctggatgtccatcgggacgccatcatcgacagcaaaggggtcagctacgccaaacgtaccaagatcaacggcgagagcgtggcccaggtgatgctggtggtgggcaccaacgatatggggctgagtcaccccaagtggaaggatcacttggcgctggcggtgcagatgcagaagaagatgctggccatcgacaagagcttcccccgtcccatcgacctgcgcagtccccgcttcaacggccacgccactcccggctccatgctggtggaggtgggcaccagcgggaacaccctgcaggaggcgttggctggggcgcggtactttgcccgagcggcagggggactgtatacatcctgtgtgaagaagtga

SEQ ID NO: 2722 - DNA, 1848 bp, unclassified Clostridiales
ttgagacagaaaagcaaccaccgagattatgtattctatctgatcctcctgttggctctgctggggttcttctggttcttcaccaaccagcacagcaccgccagcgtcccctacagccagatggtggagctgttccagtcggaacaggtgtcctccttcacggtgcagaacaatgtggtgaccatggagctgaagtcggaagtagatggcaagaaggaggcttcctgcgccatctcggactttacggccttttatgaggatctcaatcccctggtgcaggcgcagaaaaagagcggcgtgctgaccagctacgactataaaaaggacacccagtccgtcaactgggtcactctcctgccctccctgctctctgtggccatggtcttcctgctgctcatgatgatggtgcggcagaacaacgccaacggcggcggtggcggcctgtcccagttcggcaaggccaaattcacctccgcagaacagatgaagaagaaggtcagcttccgtgacgtggctggcgcacaggaggaaaaggcagagctggaggaagtggtagacttcctcaaagaccctgaaaaatacaccgctctgggcgcacacatccccaagggcatcctgctggtcggccctccgggcaccggcaagaccctgctggccaaagcggtggccggcgaagcgggcgtgcccttcctgtccatctccggctccgactttgtggagctgtacgtgggcgtaggcgcaagccgtgtccgcggcctctttgaagaggccaccaagaccgcaccctccatcgtattcatcgacgagatcgacgcggtaggccgtcagcgcggcgctggcctgggcggcgggcacgatgaacgggaacagactctgaaccagctgctggtggagatggacggctttgagggcaactccggcgtcatcgtcctagctgccaccaaccgggtggacatcctcgacccggctctcctccgtcccggtcgttttgaccggcaggtctacgtaggtctgccggacatccaggggcgcaaagaggtgctccaagtccactcccgcaccaagccgttggccgaggacgtaaacctggagaccctggccaaatccaccagcggcttcaccggcgcagatctggagaacctcatgaacgagggtgcgctgctggctgctcgcaggaatcagcggttcatcaccatgtccgacctgcaggagtccatcattaaggtcatcgcaggcccggaaaagaagagccacgtggtgacccctcacgcccggaagctcaccgcttaccacgaggccggtcacgccatcgccatgcacgccctgcccacccatgacccggtgcatcagatcaccatcgtcccccgtggtcaggccggcggcatgaccatctccctgccccaagaggaccgctccttccgctctcggaacgagctgttcgaggacatcgttgccctgctgggcggccgtgtggcagaggagcagttcctgggcgacatttccaccggcgcttccagcgacctggagcgtgccaccgctatcgcccacgccatggtggccaagtacggcatgagcgacgccctgggcgctgtggtctacgacgacggcaagggtgaggtgttcatcggccgttccatggcacagaccaagccctattccgagaccatcgccgcctccatcgaccaagaggtcaaggcgctcatcgacaaggcttacgcccagtgccgaaagatcctgtccgactacgccccccagctggagaccaccgcacagtatctgctggagcatgagaccatgtccggcgaagcctttgaggcagtgttcactgcaacggaacaggacgcataa

SEQ ID NO: 2723 - DNA, 981 bp, unclassified Clostridiales
atgagcaagaaaatcaccgtcagcaaggccatcggcgaagccctgcacgaggaaatgctccgagatgacaagatgttcatcatgggcgaggatatggctgtgatgggcaatgtgttcgccattaccaagggctttttggaagagttcggccccaaccgcgtcatcgatacccccatctccgaagagggctttgtgggaatggccgtgggtgctgccatgcgtgggatgcaccctgtggtggagctgatgtatgacgatttcgccaccgaatgtgccgaccccctgttcaaccaggcggcaaagatgcgttacatgaccggcggacagtgcagcgtccccatggtgctccgtgcgcccatgggctccggccgccgcaatgccggtcagcactctcagtccctggaaaacttcttctgccacttccccggtctgaaggtggtcgcaccctgctccgctgaggacgccaagggtctgctgaagactgccatccgggacgaagaccccgttgtgttcctggaacacaagctgctgtacgcccacaaggaagagatccccgaaggagagtacaccattcccctgggtgaagccaaggtcaagcgggaaggcaaggatctgaccatcatcacctggtcccgtgaggtcaatttctccctggaagcggcggaaaccctggcacaggaaggcattgatgtggaagtgctggatctgagaaccctgatccccttggactgggaagccatcaaggcgtccgtctccaagacccatcgcgccatcatcgtctccgaagaggtcaagcgtggcagctatgccggtgagatctccgcgcagatcgccgaagagctgctggacgagctggatgcaccggtggaacgagtgtgcggtctgaacatcgtctctcccttcagcccggtgctggaggatcagaacttcccccatccggctgatatcgtcgccgcggtcaagcgcgtgctcaacaagtaa

SEQ ID NO: 2724 - DNA, 1380 bp, unclassified Clostridiales
atggaagacgcaaaccgactgccgcgccagccggcggcaaacacccgtgagctgctgaaaaacaccctgggcatggcatggcctgccgtgctggagagctttttcattgccctggctggcatgatcgacgtgaagatggtcagcaacctaggcagctacgccgtagccgccgtggggctgaccacccagcccaaattcctgggtctggccttcttcatcgccaccaacgtggctctgtccgccctggtcgcccgacgcttgggcgaaaaacggcgggaggacgccaatcaggtcatgctcaccgctctggttctatccatcctggtctgtgccgtcatcagcaccctctgcgtcaccctggccgatcccatcatcgacctgtgtggctcccagccggacacccatgcggcagctgtgacctatttccgcatcatcatgggcggtatcctcttctctgtggtctccatgaccatcaacgccgccctccgtggcagcggcaacacccgcatcgccatgaccaccaacgtcacctccagtgtcctgaacatctgcggcaactacctgctcatcgaaggccactttggcttccccgccctgggcatcgccggtgcggccatcgccacggtctttggcacggtggtggcctgcggcatgagcctcttctccctgcgtcatccggacgggttcgtcagcctgccccatatcctcaagactaaaattcgcccagcttggaaatcggtgaaagagctgttccacctgtccgggaacattttggtggaaaacctgctcatgcgcgtgggcttcatcgccaccgccctggtggccgcctctctgggcaccgatgccatggccgcccatcaggtgggcatgaacgtgctgaccatcagcttcgccttcggtgacgggatgcaggtggcggcagtggcgctgacgggacgcagcttaggcgaggggcaaaaggagatcgccaaaacctatggccacctgtgccagcgcatcggcatcaccatctccctcatcctcgccatcctcttcgtggtcttcggccgctggttctatggcctgtacttcccggacgaaccccacatcgtggagtacggcgtggagatcatgcgcttctccaccctcatcaccttctttcagatctcctcggtcatctatatgggctgcctccgcgccgccggtgacgtgaaatataccctcttcgcctcggtcaccagcatcaccgtcgtgcgcaccgccttcacctgtctgctggtgctgggcctgcactggggactgaccggcgtgtggctgggtgtgctcaccgaccaggcctgccgcctcatcctggcctatgtgcgattccggcaagggcactgggtggatttgaaaatttga

SEQ ID NO: 2725 - DNA, 948 bp, unclassified Clostridiales
ccctatcagctctacgtcaaggacaatcaggcgtccctggtctccctggccaaggagatgggctaccacaccaccgccttccacccctacctgtcgtccggctggaaccggcccctggtgtataagtacatgggctttgacgaccagatgttcgacaccgacgtgagcaacccggagtatgtccgcggctatatctccgactcctgtgacttcaagaccatccagtccatcaccgagcgggggaagggacagaagaacttcatcttcaacgtcaccatgcagaaccacggcggctacaaccagggctggtacaacctgccccgaaccatcgccttgaagggcaccatgttcggcacaagcagctatacagagcagtacctggcgctcatgcgcaagacggacgacgccctgaaggagctgatcgactactatagcaaggtggacgagcccaccatgatcgtcctcttcggcgaccaccagggcaagctgaccactgccttctatgaacagctgttcggcaagagcacggacagcctgaccatggaggagacccagcgggagtacgtgacgcccttcatgatctgggccaactacgacatccccgaagcggagaacgtcatgctctccaccaactacctgggcgtcctgaccgccaaaatggccaacctgtccatgaccgactacatgaagtacctggcggacctgtacgagcagatcccggtcatcaacaccaacggctacatcacgccggatggcaagatgaccgaagaactgtccgacctgtccgagaccttgcagagccaggtgaagcagtaccaagccttcgccttctgcgacctgttcagtcgtttcgactacatggacggcagcttcttccgcctccacccgggcagccaagacaccgccaccggcggagccagcagcagcggcagcgccggaagtgaataa

SEQ ID NO: 2726 - DNA, 495 bp, unclassified Clostridiales
atgattgctgtgaaacggattccaatgctattgctgctgatcgcaccctatggctttttgggcagctgtctgctccagacgacggaggacacggggggcagtctgctccctgtctttgcgctgtttggggttgtgctgctgtgtaatatggtctatgcgttcctcctgcccaggctgggctttgacggacggcggattctattttggaatctgctgctgaagctctgcaatatcccagtgtacctctttgtgttcgccgtggcgctggtgaccaacgtcctcatcatccctatgctcccattccttttcctctttgactatgctttgctgctggcctccaccatgtacggtatcagcggtctgctgtgttgttgtagagagggtaaggtgtcacgaaagacgctggtcatccacagtgtggcccagtgcttcttctgcgtggatgtgttcagcgcagtctattgttatatcaaaacgcgaaatagaggcggttga

SEQ ID NO: 2727 - DNA, 1368 bp, unclassified Clostridiales
atgaaccaaacgctgaaactggaacaccctgtcacaacccgatggctcctccgctttgccctgcccaccatcatctccaacatcgtcatgaacatctactccaccgtagacggcatctttgtggcacggtgggtgaataccgacggcctgtccgccatcaacatcaccatgcccatgatcttcctcatctccgccctgggcatgatgttcggcagcggcggcaacgccctggtggccaagaagatcggcgaggggaagcaccgggaggccaaggaggatttcagcctgctcgtggtggtggcctttgtcttcagcgtgttgctggccgtgctctgcttcctcttcctggacccgctgtgtcgcttcctaggctccgacgacgccctgctgcccctctgccgggcgtacatgatccccgtcctggtcaccatccccttcgccatcttcggcatcgtcttccagatgagctacatcaccgtgggcaaggccaacctgggcctcatcttctccctcctgggcggcgtcctcaacgtggtgctggattggctcttcatcgccatcttccattggggcatcgccggtgccgccatcgccaccggcatcgggtacgcagtgccctccctcatcggcgtggtctggttctgcgtcaagcgggagcaggctctgtgcatcgtccgtcccaagtggcgcctgcacaccctcctgcaaagctgtgccaacggcgcatcggaaatggtcggcgtcctggccttctccgtcgtcaccatcctctttaacaacatcctcatgaacctggcaggctccgacggcgtggcctccctgaccatcatctggtacgcccaagagctgttcagcggcatgttccggggctacatcaccggcgtctcctctgtcgtcagctacaacctgggcaagggcgacaaggaacgcctcgcccgcgccttccgcatcagcatccggaccatcgccgtggccggtgtggccgtggtggcggtgagctgcctggctggcggggcggtcatcggcttcttcgccaagggcaaccagaacgtgtacgatgtggctttgcgaggcttccgcatcgtggcggtgagttttatcctcatggcctataacgtcttctcctccggctggttcaccgccctcaacgacggcaagacctccgccatcctgtccttctgccgcaccatcctcttcatggtggtgcccgtcctggtgctgccccggctcttcggcgtggacggcgtgtggctgtctctgagcgtgggagaggggctgagcctgctgatgaccatctattacttcgtgaaatatcgcaaggtctggacgcccgaacgcgggacggtcggacagacggagctgcaataa

SEQ ID NO: 2728 - DNA, 888 bp, unclassified Clostridiales
atgaaatcaccttgtttgggggtgtttctcgtggcaatgacgcctgaacagaaacttttttataatattgccatggtaggcggatatttcggtggttacgcctccgtacgcagcctggtgctgggctccgcccagactggcaacctgatcgggattgtggaaatgctgttgggggcgaactggatggggttcttcatccgcgtgggcgcgtcggtgctctacgccatcggcgtttgtctgaccatgatcgtccgcaaccaccggccacaggacttgaaggtctattcggtgctgctgagcctcatcggttccggggtcttcctgatgatgcccaccaagatggacgtcattttagccctctatcccatcttcttctgtatgtccttccagtggaacgccttccccggcgcctgcggctatgtgagctcgtcggtgttctccaccaacaacttccgtcaggtggtgctggggctgaccgattcccactaccacccggacggggacggcaagcgcaaggcgagattcttcgccggcaccctggtcttttaccacaccggggtcgccatcggcatcctgggcatccggttcttcggcctgcactctacctggctctgtatgctcatcctcctgccggccctgtatcaggcgctgcgggagcgaaaggccgtcctagaggcggctgcgacgctggaacaggcagagcacgcggcagcagaagccctggcggcagcccaaaatgcccctgaccaggcagtcgctgatgcggatagagccattgccgccgcagaagaagcggtggcagaggcgacagacgcggcgctggtggaggagaccgatgcgatgtccgaagcggaagtggaagcggcggacaattcccagcaggcgtga

SEQ ID NO: 2729 - DNA, 1017 bp, unclassified Clostridiales
atggtgttgatcgtgggtcttgtcttactgtttgcccgtatggaaaaggccaagaccgtctatgagattactctggacaacaacacctacactgtggagagcgattccgaacagatggaagatgtgttcaaccaggctggcttggagctgtccgccagcgactgcgtggacgcaaaggaagataaacagacggacaccgtccagatctccgtcacccacaagcagtatgtcaccgtcacctgtgacggcgcctccgtctccatcctcaccgatgagggcgagaccgtcgctcaggtcctcgaccgcctgaacatccagctgggcaagcacgacctgatctccaagaagaccaccgccgccgtgaagagcggggactccatcgtcatcaaccgggtgaagatcacctacaagaagaagaccgagtctatccccttctccaagacccgtcaggccaaccccaacatggcaaagggcaccgaagcggtgaccaccgccggtaagaacggttccaccgtctacacctacaagctcacgtccatcgacggcgcaaagcccacgtcgaagctggtcaagaccaagaccaccaacccggtcacccaggtcacctcttacggcacccgcgtccccgctccctctctgagcggcctgagccagtcccgtgactatatcaccaacatcgacgacgagaagggcaccatcaccaccgtctccggcagcacctactctgtccgcagaaagctcacctgctccgccaccgcgtacaccgcccacgccggcgctcgtaccgctaccggccggaaggcagcagtcggcgtcatcgccgttgacccccgggtcatcccctacggcagccggatgtacatccagaccaccaacggttccatgctctatggcatcgctgtggctggcgactgcggcggcggtatcaagggcaattccattgacctgtatttcaacaccctgtctcagtgctactcctttggacgtcggatgtgtactgtctacgtcctcggataa

SEQ ID NO: 2730 - DNA, 1158 bp, unclassified Clostridiales
gacagcgccaaccgcatcacctggatcgaccgggacggcacggtgctcttcgacagcgtggccgaggcggaggaaatggagaaccacgccgaccgtgacgaggtacagcaggccatgaagaccggcgaaggggagagcacccgctattccagcaccctctcccgcaagaccaccaactacgccctgcgcctggatgacggcaccatcctgcgtctgtccggcacccagtacaccgtggtgtctctgctggtcagccagttccaagccctggtggccgtgctggtgctggcggtgggtctggcggcctttctggcctatcgggtgtctgagagcatcatcgaacccatcaaccacatcagcctggagaatccggacgagcgggacgtgtatcccgaactgcgtcctctggtgcggcgcatcagcgggcagaacaagcagatccagtaccagatggaagccctgcgccaggcgcacaagcagcaggacgaaatgcgccgggagttcaccgccaacgtgtctcacgagctgaagacgcccttgacctccatctccggctacgccgagatcatccgagagggcgtggcacagccggaggacgtgaaggggttcgctgggaagatttacgacgaagcccaccggctcatggctctggtggaggacatcatccgcctgtcccagttggagagccgggaggtggcctatgagaaggagcaggtggagctgctgggcatctgcaaacgggtggtcacccgtctggagcacgcggcacagcggagaggcatcaccttccacctggccggtacggctgggaagttttggggtgtggaccaggtggcggacgagatcgtctacaacctgtgcgacaacgccatcaagtacaacaaggagaacggtcaggtcaacgttttggtgtctgagacccaggaacaggtggtcttgaccgtggaagatactggcatcggcatcccggcggacgaagtggatcgtatttttgaacgtttttaccgggtggataagagccattcccgtgccgtcggcggcaccgggttggggctttccattgtaaaacacggtgcggcttatcataaagccaagatcgaagtgaacagcaccgtggggcaggggacggctatttcggtgattttcccaaaaagctga

SEQ ID NO: 2731 - DNA, 885 bp, unclassified Clostridiales
atgaatgcgaccaccaaattcagaggccacctgtgcgccctgttctgcgtcatcgtctggggcatcacgttcatcgtcagcgctaagctgctggtggtgttcacccccatccagaccatgctgctgcgctttatcgtggcctatctggtcctgtgggtgctccaccccaagtggtacttccgctggcaggatgaagtggcctttctgctcatgtccatcttctccaacaccctctatttcatggcggagaacaccgccatcacctacacccagtcctccaacgtgagcatcctggtctccaccgcaccggtgctcactgccatcctgctggcgctgacgcctggcagcgagaagcccacccggaacacggtgctgggcattttggtggcactggtgggcatggtcatggtggtgctcaacggcgcagtggtgctcaagctgaaccccatcggcgacctgctgtcggtgggcgctgccctgtcctgggcggtgtacagcctcatcctgcagcggtacagctcccgcttctccagctacctcatctcccggaagctcatgttctacggcatcctcaccaccctgcccctgctggccatggagggcgcgcccttccccatctccaccctgttcacccagcccaccctgctgctgggtctgctcttcctggcggtgctgggcagcgccctgtgctacgtgtgctggaactcggcggcggacacgctgggggtgctccagaccaccatgtacatctatgccatccccttcgtcaccatggtcagcgccgccctctatctggacgagaccatcaccctcatgggcatcggcggggcggtcctcatcgtggtgggcatggtgctcagctccaagccggccaaagcggaataa

SEQ ID NO: 2732 - DNA, 1014 bp, unclassified Clostridiales
atgcttgccatgacaggacgagaacgcacggaagccagagaacgacaattcctctcgccccgtgcctgcctggctgacagcagtcaaggacgccgacggcaggaggagccttgcgccctgcgcacctgcttccagcgggacgtggatcgcatcgtctattccaaagccttccgtcgcctcaagcacaagacccaggtcttcctggagccggagggcgaccactaccgcacccggatgacccacaccttggaagtgacccgcatcgcccgaaccatcgcccgtgccctgaacctgaacgaggacttgacggaggccatcggactgggacacgacctggggcacaccccctttggccacgccggagaacgggtgctcaatgagatcatgccggagggctttcagcacaacgtccagtccctgcgggtggtggatgtgctggagctggaaggggacgggctgaacctgacccacgaagtgcgagagggcatcgtctgccacacgggcaatgtgaaggccaagaccctggaggggcagatcctgtggttcgccgaccggatcgcctacatcaaccacgatatcgaggacgccatgcggggcggcatcatctaccccacagacatccccctctacttacagcaggcgttgggctacaccaaaacccagcgcatcaacaccctggtcaccgacgtgatcgagaacagcaccgaccaagaccacatccagcagagcgaggagatcggcgaatatatgaacgacctgcgggactttttgttccagtcggtctaccacaaccctatggccaaaggggaggaggggaaggcgcaggagatgatccgcagcctgttcgcctactaccagcggaatccggacgacctgcccagcgatttccaggacatccgcgccagagacggggtagaccgggcggtgtgcgactatatcgccggcatgaccgattcctacgccgtggagaagtttgaagagctgttcatcccacgggcgtggacggtgaagtaa

SEQ ID NO: 2733 - DNA, 795 bp, unclassified Clostridiales
atgatccaagacatcgcccccgccgcctttgacggcgcatttcacgaccgcacgccggaagatggttcgcctatcttctgtttttggaagaacaccgtcctgctgggcaacgacaacaccctgcccacctatgcccagctgcgtccacacctgacggacaccacctacctgttcgccatcggccaggtaacgtattacctaggtactgtaccaaaccaactgtccctccccggcttcgcctggctcccccaccgcaccctccgcaagctcacccccatgacccagaccctggccgggttcaccgcctggcatttgtcacactggtatcgagacaaccggttctgcggccgctgcggacaacctatgacccacgccgctacagaacgcaagctggtctgccccgcctgtgggtatcacacttacccccgcatcaacccttccgtcatcatcgccgtccacgacggcgaccgcatcttgctgtcccggtacgccaaccgtcccgtgacctggtacgtgctgttggccgggttcatcgaggtgggcgagactgcggagcagtgcgtggcacgagaggtgcgggaggagactggtctacaggtgaagaacatccgctactacggctcccagccttgggggctgaccggcgggttgagcttggcgtatacggcggagttggatggatctgatgtgctgcgtgtggatgccgatgagcttgcggaagcgcggtggttccggcgagaggaagtgccggtgaacgagcgggatcgggcatcggtgacgcaggatatgatgcgg

SEQ ID NO: 2734 - DNA, 582 bp, unclassified Clostridiales
atggacgtcatcaaagaaatgcaggaaatgcgtgccatgaaggcacaggtagaagagctggccaagcaggggatggatccgaaggatttgaaccagaagctgcagctgccgagaaaagagtgggagagcgacctggcctggaagacccgtgtgctgaccttgagctatgccagcgacttcatcgatgccgcagaagccaagaatatccagctgaccttccagcccgaggaagcggaggcggtggctcaggcggtgggtgccgcctatgagtacaacctggtcaaccgggaagtggatcacaaggacaaccaggtgctggtcagcaagcagctgggctgctacttagccctgaccctgtgccacgcacgggagggaaagctgatggtcaagaccgtccccgccacccctgtcaccggtctgacctctctgctggtcagtggcatggtgctgacggtgagcctgcccaagttccgggaggtgaacaccatcgaggtggccaacaaggtggtcaagaccatgcgcgtcaccgacgaggggctgctgagctataaaaagtccgcggtcatcaacctgctcaagtga

SEQ ID NO: 2735 - DNA, 2604 bp, unclassified Clostridiales
atggcggatatcacgaccgtggaagcgttgacggcaaaaatagctgagatgcgaaaagcacaggaaattttttcgacttattcacagaaacaagtggacaaaatctgctgtgctgtggcgatggcggccattcaggatcgtgtttcactggcaaaaatggcggtgcaagagacgcaaatggggattttagaggataaaatcctcaaaaatcattttgcggcagaatttgtgtaccataagtatcgggattttaaaacttgtggcgtgcttgaaacggacgaagagttgggaattcaaaaagttgcggcgccgttgggacttgtaggtgcaattcttccggtgaccaatccaacttcgtcggcgattttcaagattttgctctgtatgaagaccagaaatgccattttgctcagtccgcaccccaaggccaaggactgcacctgcgcagcagtggagtgctgcgcggaggcggcttaccgggcaggggcaccgcaggggatcattgagtgtcttgcggatcctgcgctggaattgacccaaacattgatgcggtccgttgatttggttttagcgaccggaggtgcggatatggtgcaggcggcgtatgcttccgggcggccggctattggggcgggcagtggaaactgtccggtcattatccatgaaagtgcctgcatacagggtgcaatccgctcaatcgttcactcaaagacatttgatgctgggctgctttgctcatcagagcaagcggtcattgctgtgggcagtgagactgcggaacaagtcaaaaacgcatttgaacagtggggtgggcacgttttggattcagaagaatgtgacttgcttcggggattgtttgcgactgcgaaggcaaaactgataggaaaaaaagcagactttattgcgcaactggcggggattgatgttcccaaggaaaccaagctattgattgcacaggcgtcggaaatttcggagggggagccgtttgcgctggaaaaattgtgccctgttttgacgctgtatcgggcggaatcgtattttcaggcgctggacatggcggagcaactgcttcagttgggtggcgaaggccacacagcggtcctctatattgacccgaaggcggaaaaagagattgccctttggcgggaacggatgaaagcctgccgtttgctggtcaacagccccacagcacagggggctgttggcagtatttgcattgggctgccgcctgcgttgaccttgggctgcggcacatggggcggcagtggactggcggggaatctggagcctcgacatttactgaatgtcaaaacggtcgctttccggcgagaaaaggtgttgtcgctgcggctgcctgaggcagtttaccatgaagcaggatgtactgggacagcgctgttggaattgcaggagaagtaccactatgaacgggtcttttttctcacagaccgctacctgtatcaaaacgaaaatgtcataccggtgttgaaactgctggaacggatgggcgtgatgtatactgtctattgcgaccttgcaccaaatctgacggcggaacaggttgaaagggggattacagcgctggagcggtttcaaccggatgcgattgtcagcatggggggcggcactgtactggatgcggcgaagctgatgcggtatcgctgggagcatccggaagtgtcttgggaaggactgcggctcaactttttggatgaccggaagcgtgttttggaggcggagaaacgtgaacaaaaaacaccgctttttaccattgcgacaactgcgggaaccggggctgagtgtaccccttgtgctgtagtgaccgacgaaaaaacgggcgttccgtggcagatttatcaccccgaattgttgccgactgcggcgatcattgacgcagaccacatgaagtgtctgcccaaaggactgaccagagagggcgggatgggcacattgacgcgggcgttggaaagctatctttcgttatgtgctacggattacacggatggatttgcgctgttttcctgcaaaaatgtgctggattatttgctgtgtgcctatgacagattggaagaggacgaggcggcacggcgaaagctggcagacgcctccgctctggcgggtatggcggcggcaaacacgtttccggggttggtttccagcatggcttgtgccctcagtgcatggcaccatctatcttatggggtatcctgcggtatcttgctgccggaagtgatggcttatcaggcgcaaaatgaagtgcttcaaatgaaccagttttttaaccgaccttatcgcagccttaagaaacgttatagaaaactagccgccttttgcggccttggtgaaggggcggatagggagccctttgcgcagttgctgcgtgcggtgcggcaactgcgggacagggtggagatctacccgaccattcaggcttatggggtggaggaggcgtattttttagacacgctggatcggatgacggaggtggcttggaatcatccgtggatgaactacagcccggtggttcccgggatagcggaggtgcgaaaattgtatttgcgctgttattatggagaagattggaaagaacgaaggcccgaatag

SEQ ID NO: 2736 - DNA, 891 bp, unclassified Clostridiales
atgaccaattatccgtacaagacccgtgaaggcggcgcaaccgtcacggttttcgtcccctatgactgcggcaaccattgcccgttctgcatcaacaagcaggaatacgagaaccccgtaggcttcagcctggagaagatctgtgaatccatccgcaccatggatgagatcacccccaagtgtgacttcgtgttcaccggcggcgaacccttcgctgacctggacgctctgcagaccatgctcgaccagatccccaccacccatcgcgtgttcatcaacaccactctgcccaccctccagggtgcgaccgaggacgacctggtggcgttcactgagaagaacaaggacaagatcacctgcatcaactgctccagacacgtggtcaagtacgtcgccgaatgcagcgacgacatcttcagccgtattgctgtgcccgtccgcgtcaactgcgtgctgtacaaggattatcccaaggaaaacctgaagccctacctggatcgcttcaagccctatggcgtctctgtccagttccgcttcgactacaccgacaccacccccgaaaacctgtatgaggaagagtccgacaagatcctccacgacctgaaggatctgttccactacactggtatggatggctgccgtatgcgctgcggttatcacttcgattatgacggcatggaactgacctatcataagactctgccctactccaccattcaggaagcagacgaaaacggccagacctatcgcatcctgtacgacatcattgtcaagcagaccggcgagatccattccgactgggatggcaccgtgatggatgttgacgcttatcgcaacgtcgtctttgaaccctatgacctggtggttcgtgaaggctacatcaacgagtaa

SEQ ID NO: 2737 - DNA, 1536 bp, unclassified Clostridiales
cgggaagagcatgtggacacggacaacaccgatgccaccaatctgaccggtgtggtcaagaccaaaacgaagtatatcaacatccgctccgccaagagcaccgactccgatgtggtgtgcagagtgcccgccggcaagagcgtgtccatcatcggtgcgctggacgcagagggttggtaccaggtcagttataagaatgacaagggtacccacaagggctatatgatggccaaatatatctccgtccccagcatctccaccggcaacatcggcacctccagcgctgtcctccgctcttccgcggacagcagctctgaaatgctctgtgtcatccccgaaggcgacaaggtctctgtcctggccgctctgggtgactggtatcaggtggaatacgatgacaagatcggttacgtggacgcaaactgcgtggaatccgaagccctgagcaagagcaagggctatggcaccgtctccgttgacaccctcaacgtccgcgccaagcggaacatcgagtccaacgtggtcaccaagatgagcaaaggcaccaccttccgcatcaccagcgccaaggacggctggtatggcgtgaccttcaacggcgtcagcggctatgctaaggcagaatatgtcaccgccaccgacaccatcgactctggctacgtccaggtcacctctcagactctgaagctgcgctccggcgctggcaccgactacgatcagctggccatcgtgccttacggcaccgtcctgaagatccacggctctctgggcagctggtatcaggtgaagtacaacggcaaggaaggctacgtgtgcggcgattacacctctgccaccacctccagcggctataaggcttatcccgactttgccaaggtcaccgcttccgctctgggtctgcgggtcaagcccggcaccgacagtgaaaagtccttcaccatccccaacggcaccatcgtttccgtccgcgggatgcaggatggctggtacaaggtcgtcgtctacggcacccataccggctatatcgacccgtcttacaccgagagaagctccggtcctgccaccgtgcctcaggtcaccacgactaccaccactggcaccactacgactggtacgaccaccggttccaccacgacctccagctcttccagttcctccagctctagcagctattcctccggttcctccggcggcggcagcggttcggcggtcctggcttatgcacagcggttcgtgggcaacccctacaagtggggcggcaccagcctgaccaacggcgctgactgctccggcttcgttcagagcgtctacgcccacttcggcaagagtctcccccacagctcctacgcggacgcacacgtgggacgcggggtcagcaagtccgatatgcgtcccggtgacatcgtcgtctacggcggtcacgtgggcatctacgccggcggcggcaagctgctgagcgcactgggcaagaagtatggcatcacctattgcagtgtcaactacaagcccatccaggcggtccgccgtctgttctaa

SEQ ID NO: 2738 - DNA, 513 bp, unclassified Clostridiales
atgtcgaatgcattgtcatccaccgccaatgactttctccatgagatgagtcacaaatttacccagagcaatcagatcgacccacaggcgtccaaagggatcgacatcaagcgcggtctgcgtaaccacgatgggaccggtgttatggtgggcgtgacacagattggcaacgtgtatggctactatatgcaaaacggcgaacgagtacccatgcccggcaagatggtctaccggggcatcaacgtagaagatttgatcttgggcttcacctccgaaggtcgctttggctatgaggagacggcgttcctgctgctcatgggccacctgcccaccagagaagagctggatgggttcaaccaggtgctggatgagctgcgcccgctgccgcccatgttcaccgaggatcagatcctccgcgcccccagcagcaacctgatgaacaagctggctcgtagtgtcctgaccctctattcctatgacccggacccggagactatgaccctggagaacgaa

SEQ ID NO: 2739 - DNA, 567 bp, unclassified Clostridiales
atgcaggcgcccaatcccatggtgacctttttcaagaccctcgatgtgaccagcctggtaaagctgtcccggcaacggggcctgaaattcaatatgctcctggactactgcatcggcagagcggccgtaagcatcccggaattttttctcctcccggtgggcgatgcgctgatgcaatacgactccatcgccgtcaacaccatcgtcttgaatcgaaccggccaggtcagctcctgtgacctcccctattcggacaccctggagcagttcaatcgggactacctgacctacaccacccagacagcagagacctgccaagaccacgacctgtcagaggagagtatggtcatcggtacgtccgccattgtggacactgagctgaacggagccgttgggatgaacagcggcatcttccacaaccccttcctcatctgggggaaatatcgcaaacgatggttccggtatgagctgcccgtctccttccaatttcatcatacgcagatggacggcgcccatgcaggcagattcctgaggaatctacagcaggagattgaccagctgcactga

SEQ ID NO: 2740 - DNA, 1146 bp, unclassified Clostridiales
atgaaaatggaatggaaggattgccggcgtctggtggtcagcgggctgctgctctacctggccatccactactggtcggtgctggccgacctggcggagatctgcgtgggtgcgtccgcgcccctgatcttggggttcgtgctggcctacatggtcaacatccccctgaccttctttgaacggaagctgaagctggaacagcgcttccccaagctgggggctggcgcaaagcccctgtatgtgctgctgacgctggcggcggtgggcggtgtgctcttcctagtggggaagctggtggtgccggagctggtgcgttcggtgcggctgatgtacattcaggtgagcacctgggcgcaatcgttggacttggagagcgtgggcgacctgaacaagctctacgctctgctgccccaagaggtcctcaattggctgcaaaataccaactgggagaacgccgtgaaacaggccgtccaattcctcacccacggggtggggggcaccgtcaactgggtggtcagcgcggtggggtccgtgttctccaccatcgtcacctgggcgctggcgctggtgttcgccctctatctgctgctgggtcgggacaccctcctggcacaggggcggcggctgctgggcacctatctccgtcccaaggactgggatcgggtccactatgtgttccagaccatggacgagtgcttccacggctatattgtggggcgctgctttgacggtgtgattttgggcgtcctgtgtatcctgggcatgacgattttgcgcctgcccttcgccctggccatcggcaccctggtgggggtcaccgccctcatccccatcgccggcgcttacatcggtgcggtggtgggtgccctgctcatcctgaccatctcgcccatgaaggccctcatcttcatcgtcttcctggtcatcctccaacaggtggagggaaacctcatctaccccaagctggtgggcacctccatcggcctgcctggcgtgtgggtgctggctgccatcactgtaggcggcgggatgctggggatcgtgggcatgctgctcagcgtgcccatcgtggccaccctgtaccggctgctccagagcgacatgagacagcgggggaagaaggccagggcgaaaccgaaagcgtaa

SEQ ID NO: 2741 - DNA, 1827 bp, unclassified Clostridiales
atgcaacagtcgaaactgagaaatatcgccatcatcgcccacgttgaccacggcaagaccaccctagtggatgccatgctccagcagagcggtgtgtaccgagataaccaggcggtggtagagcgcgtgatggactccggtgacctagagcgggaacgtggcatcaccatcctggctaagaacaccgccgtcacctatggcgataccaagatcaacattgtggatactccgggccatgcggacttcggcggcgaagtggaacgcatcctgaagatggtcaacggcgttatcctgttggtagacgctgcggaaggccccatgcctcagacccgtttcgtcctcagccgtgccctggagctgggccaccgcgtcatcgtcgtggtcaataagatcgaccgtcccgaccagcgtgtccacgaggtcatcgacgaagtcctggagctgctgctggatctggacgccaacgaggaacagctggattctcccatcctgttctgttccgcccgcgccggtgtggcctccaaggaccccgatgtcatgggcaccgacctgaagccgctgttcgagaccatcctggactacatccccgctcccgaagtcgatctggacgcgcccttccagatgctggtctcctccatcgactacaatgaatttgtgggtcgtatcgccgtcggtcgcatcgaacggggctgcatcaagcagaaccaggagattcaggtctgcaattaccatgacccggacgccgtgagcaagaagttcaaggccacttccatctttgaatacgacggcctgaagcgggtaccgggcaccgaagtggaagccggcaacatcatcgccatgtccggcatcggcgacatcaccatcggcgacaccatttgcgcccccgaacaggtggagcccctggaatttgtcaaggtctccgcccccaccatggagatgaccttctccgtcaacgacagccccttcgcaggccgggacggcaagttcgtcacctctcgtcagattcgtgaccgcctcttccgggagctgctcaaggacgtgtccattcgcgtcactgaagtggaagattccaccgacagcttcaacgtggccggccgcggcgaaatgcacctgtccatcctcatcgagaccatgcgccgtgagggctatgaatttcaggtctctccccctcgtgtcttgatgcgtgtcattgacggcgttaagtgcgagcctgtggaaagattggtggtggacgtgccccaggactacgtgggcagcgtcatcgaccagctgaatatccgcaagggtgaattgcagaacatgaacccggtgggcagccgcatgaagatcgactacctgatcccctcccgtggcctgtttggttatcggaacgaatttttgaccgcaaccaagggcgaaggcatcatggcttccgtttttgactcctatgcaccctacaagggcgatgtggaccgccgcaataccggttccctgatctcctacgagactggcgtggccagcagctacggcctgttcaacgcccagcagcgtggtaccctgctcattggcgccggtgtggacgtctacgagggcatgattgtgggcgtcaaccccaagaatgaggatatgccggtcaacgtgtgcaaaaagaagcagctgaccaatacccgtgcgtccggcagcgatgacgccctgcgtctggtgccgcccaagcagatgagcctggaacagtgcctggaattcttgggcgacgacgaattgttggaggtcaccccccagcatctgcgcctgcgcaagcggattttgtccaatgacctgcgcatgaagaccacccacaaaaagaaataa

SEQ ID NO: 2742 - DNA, 1377 bp, unclassified Clostridiales
atggctgaacaactggaacgaaaactgctccgcctggcggcagactatcagatgttcccccccggcagtcacgtcttggtggcctgctccggcggtggggactccatgtgcctgctcaccctgctgtggaacctgcgtcaaaccttgggcatcaccctttccgctgcccatttcaaccaccaactacggccagaagcggcggaagaggcggaatttgtccacaactggtgtgcaaaacagggcatcccctgtatcatcggcacggaaaatgtggccgcgcaggccgcccaaaccggtcgtggcctagaggagaccgcacgggagctgcggtacgcctttttggagcgcacacgccacgacctggccgcccaccgcatcgccaccgctcaccacgcccaggacaacagcgagaccctgttgctccacctgatgcggggcagcggtctccgtggattgggcggcatcccgccggtgcgcggaaacatcgtccgaccactgctcaccgctcagcggcgggaaatccagtcttacttgacccgccaccacattccctatgtggaggacgcctccaaccaggacctccgctatacccggaacttcatccgacacgagatcctgcccctgttggaacagcgcaaccccaacctagacgcccgcctgtgggagagcgcctgccagttccggcaggagaacgcttacctggacgaacaggcgcgaacgttgttgtccgacctgcacgaaacgccggatgggttggccttgccctgtgctgcgctgacgcaagggccagaagtgctggccctccgcgctgtgcagcagctggcgcaggtgttggaaccggaactggtgctctccgccgcccaccgaaggggcatcctagcgctgtgtcaggggaaccgcccctctggacagctggcactgcctttgggcgttatcgcacggcggaactacgaccgattcgagctggtgcgtgggaaacgcccgccctttttgccggtcaccctgcgcctgccctttaaacgggacgtggccggatggcacatcacctgcgaaagaaccctttgtccgaccgggaaattcaaccagccccggtgcttttacctggctctgcccgaagacgcgcaagtgctgctgcgtccccgccaaactggtgacgccattaccctgcccgcgcggagccggaggaccattaaaaaactactcatcgacgccaaacttccccgccagcgccgggactttctcccggtgtgggagtggaacggtcaggtctgcgctttgaacgagtttggagccgatcaagcctttttaccacagccaggccagcctgcctggcgcatcactgcggtacctgccgcaaattccattcatgcgagatag

SEQ ID NO: 2743 - DNA, 816 bp, unclassified Clostridiales
atgaaaggtacatttactggcgccagcaactatatcgctgcggaagatctgctgggtgcagtcaacatcgctatggcactggaaaagcccctgctggtcaagggcgaaccgggcaccggcaagaccatgctggctgaggccatcgcggaagccctgggcaagcagctcatcatctggaacatcaagtccaccaccaaggcacaggacggcctctacgtttacgacgtggtgcagcgtctgtacgacagccagttcggcaacgccggcgtagacgacatcgccaagtatatcaagctgggcaagctgggcgaagcctttatggccgacgaacaggtggtcctgctcatcgacgagatcgacaaggccgacctggaattccccaacgacctgctgtgggagctggataagatggagttctatatccccgagaccggtgagaccatcaaggcaaagcatcgccccatcgtcatcatcacctccaacgcggagaaagaactgcccagcgccttcctgcgccgctgcatcttccattatatcagtttccccgaccgagcacaaatggaagagatcgtccgtgtccactttgaccagctggatgaagcgctgctccagcagaccctggacgccttctaccgcatccgtgagatggacgacatcgaaaagaagcccagcacctccgagctggtggactggatccacgcccttatgctcagcggcatcccccaggaggacatcctgaagaagatccccttcgccggcgtcctgctgaaaaaggatcgcgacctggaggccctgcgcaatcggttgggcaactga

SEQ ID NO: 2744 - DNA, 924 bp, unclassified Clostridiales
atgaatttgctgagaattccccctaaactttacttcaaaagaggttgtcttcctgtcgctctgcgcgagatgaaggaagtctatgacctgaatggcgcatacattatcacttctcccgatctgttcaacaagggtgttctgcatgaagcatccagcctgctggaaaagtctggcctgggcacttgtgaatacttcaccctggacaaggaactgaccgttgacaacgtgaaggctggcctgcccaagatgcatgagttcgaacccgacctcatcgttggtattggtgacgaagctgccctgaacgctgcaaagattatgtggttgctgtatgagaatcctgaagctgacctggctgcactggctggcggcgcagcattccccaagctcggcaccaaggctaagctggtcctgatccccaccgctggcggcactggcagcgcttgcgctccctacgcttccatcctggacggcggcaagaagctgcagctgaagaattatgacctgctgcctctgatggcagttatcgatcctcagctgggtgactatcaggtttccgctgacatcaaggcagatggcttgctggctctgaagaccgctattgctgcatatgtagcacctgctaagattgattatgctcgtggctttgctatcgatgctactaacctggtcatcaagaacctgaaggcagctatggttggcggcgaaaaggctcccgatgcctatgacgcaatcgccaacgctgttaccatcgctggtatctcctatgcttgcacgactggcatggctgatcccatggatgctgctgcaaaggtcgaagacctggtgaaggctgacaaggctgctgctgatgaactggctgcacattgcggtctggctgacgctaaggctctggtcgctgaatacgataagctggctaagctgtaa

SEQ ID NO: 2745 - DNA, 2160 bp, unclassified Clostridiales
atggatttactcattcaacaactggctcaggagctgtccctgaatcccacccacgtggaggcagtggtcacgctcctggacgaaggcaacaccatcccctttatcgcccgctatcggaaggaagcccacgggagcatgagcgacgacgtgctccgggacctggctgaccggctcaattacctgcgcaacctgtccgcccggcgggaggagatccgcaaggccatccagacccagggcaagctcaccgccgccctcagcgccaagctgaacaaagcggacaccctggccaagctggaggatctctaccgcccctaccgtcccaagcgccgcacccgcgccaccatggcaaaggagaagggcttagagcctctggcggctgcgctgctgttccagcagaaggacagcgtgccggaagcactggcagtagcgtacgtagatgcggacaagggcgtcaagacggtgaaggacgcgttggctggtgcttcggacatcctcgccgagagtatctccgacgacgccgacacccggaacctgctgcgggaagagctccagcgccacgggcgtctcaccgttcgggcagcccaggaggaggactcggtctatcggaattactacgaatttgaccagcccgtcagccgtctccaggggcatcaggtgttggccatcaatcgcggggagaaggagggggtcctaaaggtgaccgtagagctggaaccggaaccttccctgcgtctgttgaatcggaaatgggtccacggcaactccgccagcaccgaattggtgaaagccgccgccgcagacgcctaccagcggctgattttccccgccctgtgccgggaactgcgcagccagctcaccgaacaggccagcgaaggcgccatccagaccttctcccgcaacctgaaacccctgctcatgcagccccccgtgaagggcttcgtgaccctgggcttagaccccggattcgtcaacggctgtaaggctgccgtagtggacggcaccggcaaggtgctggacaccgccatcctctatcccaccaccagcaaacgccgccgggcagattccatgcagcgcctaaaggagctggtggagacccaccacatccagcacgtggccatcggcaacggcactggcggccgggaagcggaacagttcgtggtggaggccatccagcaggaacacctgcccatctcttacatggtggtcagtgaggcaggcgcttctgtctattccgcctccaagctggcgtcggaggagctgggacagtatgacgtgaacctgcgctccgccgtctccatcgcccggcggatgcaggaccccctggcagagctggtcaagatcgaccccaaatccatcggcgtgggccagtaccagcacgatatgcccgccgcccgcctggacgccgctctgggaggcgtggtggaggattgtgtcaacgccgtcggcgccgacgtgaacaccgcctctcccgcgctgctcacccatatcgccggcctcaacgccaccaccgccaaaaatatcgtggcctaccgagaggaacacggccccttccacgcccggaaggagctgttgaaggtggccaagctgggccccaaagccttccagcagtgcgccggcttcctgcgtgtgccggagagcgactccatcctggacaacaccggcgtccacccggaatcctacgccgccgccaccgccctgctgaacctgtgcggctacaccttgcaggacgtggccgaaggctccatccaggcgttggccttgaagttgaagagcctggacctgaccgaagccgcccagacctgcggcgtgggacaggccaccttgcaggatatcgccgccgaactgctcaagcccggccgggacccccgtgacgagctgcccgcccccatgctccgccaggacgtgttggagatgaaggacttgaaggtgggtatgtccctgcagggcaccgtccgcaacgtggtggacttcggcgccttcgtggatatcggcgtccaccacgacggcctggtccatatctccaagatcagcgaacgctacctgaaacaccccagtgaagtcctgtccgtgggcgacgtggtgcaggtggccgtcatcgacgtggacgtggcgaagaaacggatctcgctgtccatgaagaaggaagacttcgcagaataa

SEQ ID NO: 2746 - DNA, 1071 bp, unclassified Clostridiales
atgttggatatccgtgttgaattgactaagaccccgaaggcaaagcctgctgatgagagcaaactgggcttcggcaaggaattttccgaccatatgttcgtcatggactacgatcctgacaacggctggcatgacgccagaatcatcccctatcagcccttccagatggatcccgcctgcgtggtgttccactacgcccaggagatctttgaaggcctgaaggcatatcgtaccgcagaaggcaagatccagctcttccgcccggactgcaacgcccagcgcagcaacgactccgctgaccgtatgtgtatgcccaatatccccgtggaagactttgtgcaggccgtcaaggctctggtgaaggtggatcaggattgggtgccccacaccgatggcacttccctgtatatccgccccttcatgatcgccaccgacgtgggtctgggcgtccacgcttccaagcactatcgcttctgcatcatcaccgctccctccggcgcttactatgccgaaggcctggctcccgtgcgcatctacgtcgaggatgaatacatccgtgcagcccccggcctgaccggcttctgcaagtgcggcggcaactacgctgcctccatcaaggccggcgacctgtccgaacagcagggctatgcccaggtgctgtggctggacggcgtggagaagaagtacgtggaagaggtcggcgccatgaacatcatgttcaagatcaatggcaagatctacaccgctccctgcgtgggcactgtcctgcccggcgtcacccgccgcagctgcatcgagttgtgccgcgattggggctatgaggtcatcgaggacagactggccatcgccgacatcatgaaggctgccgaggacggcaagctggaagaggtcttcggcaccggcactgccgctgtcgtctccccggtcaaggaactgaagtggatggacaaggttgcccacatctccgatggcaaaatcggccccctgacccagaagctctacgacaccctcaccggcatccagtggggcaagatcgaagacaccaagggttggaccgttcctgtggaataa

SEQ ID NO: 2747 - DNA, 1560 bp, unclassified Clostridiales
atggcacaggatattaccattgcattcatgggcaaccccaactgcgggaagaccaccctgttcaacgcatacaccggagccaatctgaaggtggccaactggccaggcgtcaccgtggagcgagtggaaggcgccattcgagatcacgacatgaacctgcgcttggtggatctgcccggcacctatagcctgacttcctacaccatggaggagcaggtgtcccgccaatttgtcatgggggacgaggtggacatgattatcaacgtcgtggatgcatcgtccttggaacgcagcctgtacttgaccttgcagctgctggagattggcaaaccggtggtagtggcactgaatatgatggacatcgtccataaacgggggatggagatcgacctgcaccgcctgccggaaatgttgggcgtgcccaccattcccgtctccggccgcagccgcaccggtctgcaaaccctcatgcacacagcagcccatcatgcccagagcgtgaagccggacaagctcatccacaaccatggtgacgacggtctagaggacaagcacgaccagtacgccatggtgtacagtgagccgctggagcacaagatcgacttgctcagcgaacggctggacaagcgttaccctgatattcaaaatacccgttgggctgccatcaaattgttggagcaggataccgaagtgatggaaaagtatcctttggactgcgcggacattttggatcgcagctatgaaacggagatcatcaacgaaaaatacgcctttatcgaagaaatgatccatgaagtcctcttccgccacgaggagaaggaggagatgactgaccgggtagaccgcatcctgacccaccgttggtttggactgcccatcttcctgtgcatcatggctctcgtgttcttcctgacgtttttcctaggcgaccgcctcagcgatgggttccaattccttctgacggcattgtccaatggaaccacccacctgttgcagttcttgcacgtgtccgacgtggtcatcgccctggtggtggatggcgtcatcgccggtgtgggcggaatcttgacctttttgcccaatatctttgtcctcttcctggccttggcactgttggaggacagcggttacatggctcgtgtggcctacgtgatggacggtatcatggggaaattggggctgtccggacgggcgttcttgcccatggtgctgggattcgggtgcagtgtcccggccatcatggcctcccgcgtgttggaaaaccccagagaccggtataagaccatgctggtcaccccgttcatgtcctgtagtgcccggctgcccatctatgtgctcttcgccagcatcttctttggcaaatacaagatgctcgtggcctattcgctctacctcatcggtatcgtagtggcgctgctggtcatgctggtgctgcacatcggcgacaaacaccacgagcccaacgacctgctcatcgagctgccggagtacaagaaccccagcgcccgcaccgtggccatctacgtgtgggagaaggtgaaggactacctgactaaggcg

SEQ ID NO: 2748 - DNA, 1005 bp, unclassified Clostridiales
atgaaaaaagcactggcactgattctggctgccgctatgtcctgcagcctggttctgaccggctgcggcggcggcaacgcagcagcaggttccgcatccaccggcgcagctgcagcaggcgctcagagcctgactctggccaccggcggcaccaccggcacctattacgcagtgggcggcgtcatgtccaccgttctgaacaagaagctgaccaagagctctctgaccgtcacttccaccggcgcttccaaggccaacatccagctgctgtctgacggcgaagccaacctggccatcgtccagaacgacgttatgcactatgctgcaaccggcaccgacctgttcgaggcagaaggcaagtatgaatccttctcctccgtctgcggtatgtatgacgagaccgttcagctggtcaccaccaacgccaacatcaagtccgtcaaggatctgaagggcaagaccgtctgcgtgggcgacgctggttccggcaccgaattcaacgcaaaacaggttctggccgcttatggcatgagctttgatgacatcaccgtcaacaacgctagcttcggcgactccgctgacagcctgaaggacggcaagatcgacgccgccttcgtcgtcgccggcgctcccaccaccgctgtcgttgacctgtccaccgctgctcaggtctatgtcatccccgtcgatggcgcagaacgcgactccctgatgaaggactacgcattctacaccaagaccaccatccctgccggcacctacaagggtcaggacgccgacgtggagaccgtttccgtccgcgctaccctgatcgctgctgatgacgtgtccgaagacgccgtctatgagctggtcaaggctatgttcgacaaccaggaagaactggtcaagggtcacgaaaagttcaacaacctgaagctggaagacgcaaccaagggtatcgacgtgaagttccatcccggcgctgtgaagttcttcaaggaaaagggcatcgacgttgcttaa

SEQ ID NO: 2749 - DNA, 900 bp, unclassified Clostridiales
atgaaccatcgtcgtctgacggatttgaccgctgtccttgccgggacagcggtttttttcaccatcctggccgccgcaggcacaaaaaaagccgcccaggcggtgtctgggacggtacgcactgccgctgtggtctgcacgggggcgttctgctatgatgcgccccaaaccttgtcggcggcggatttttgcgactttgacggttcgggtgcggtgacccaaggggcggtgattggtttttcgcagctggtggagctgtcggtggatgggttacaggaaggggcgggaaagggcgttgccaactatcaggtgctggaatcggcgctgtcttttgtggcacggtttacccagcgggagcgttacgcggacaccctgttccgtctgaccctgccgccggggatatatgagatggacggccagggggaaccgctgcatctctatcagaacacctggctgtccatggagggtgtgaccttgcgaaagagcgacagtgactgttctgccctgctgcggaacacgccgtcaggaagcgcctatgccgggtacgaggccaactccaatctggtgctcaccggcggggtgtgggaggtgccgctggagcatttcgacgcccgctcggaggaggatcgtttctctgtcctccggttcggccactgccggaatgtactcttggctggggtcacggtctctgggtgtgtgaatgggcatcatttggagctgtgcggggtggaaaactgttcggtggtggacagcacctttcatgggtatttggacacggagtatcacggcaagggggacaaaaaggaggccatccagctggatgtggtcaacaaccgctgggtagcgcctgggtttccggactttgacgacaccatcacccaggacgtcctcatttatggc

SEQ ID NO: 2750 - DNA, 582 bp, unclassified Clostridiales
atgactgcttttccaaccacatatcatgaacagagtgatgagaccctctgcgccctggccgcccaaggagaccggacggcggaggaagccctcatcagccgctatacccgtatggtgcgcagactctcccgtcccttgttcctcatgggcggggacagcgaggatttgatccaggaggggatgctgggtctgtggaaggccgttcgggattatgtgccggatcggggtgcttccttcaagaccttcgcccagacctgcgtgaagaacagtatgctcaccgcagtgaagaccgctgcggggaaacaccatatccctttgaacgattccgttcctttcgagacccttctttttgacagaggcgaacagctggccgtcagcgacccggagacgatgtacatcgaccaggaggcgacccaggcgcagctggatcaattctacagtaagctgtctggtttcgaggcgaaggtgcttgatctgtttctcaacggcctctcctatgcggagatcgcagatcaggtggatcggccggccaagtccgtggacaacgccgtccagcgcatccgccgcaagctcgccaagtga

SEQ ID NO: 2751 - DNA, 2187 bp, unclassified Dialister
atgaagcattttaaacttgcttattcagacaaagcttattccgttcttaacccggtaactgaacgtgaaatcgttggtattaacgatactgatttcaccgacgttgcagccatcgtaattactgatgctgataccgctattcttgatgaagaaccaaagattgcagcatttggtattccagtattcctggtactggtagaaaataccgttgctagcgatgacgttctcaagaaggtattccgtgtaatggatcttagagaagttaaccgcggactctatgaacgccagattgaatctgcagcagctaagtacgaagacaacatgctcccgccattcttcaagggactcgttaagtacgtagaacagggctatgctcagtttgactgcccaggtcatcatggtggtgcatacttcaccaagcatccagctggtcatgcattctatgatttcttcggcgaaaacatgttcagagccgacctctgcaacgccgacgttgcaatgggcgaccttctgattcatcagggcccggcactggctgctcagcagcatgctgctaaggtttacaacgctgataagacatactttgtactgaatggtacttctacttctaacaaggtagttctgaacgcagtagttgcaccaggcgacatcgttctttacgaccgtaacaatcataagtccatttcccatggcgctctcgtagaacagggtggtatcccggtatacctcgaaacttcccgtaactcctacggctccatcggtggtattctggctcactgcttcgatgaagactacatccgtggcctcgtagctgaacgtgatccggaaagagctaaggctgaaagaccaattcgtctggcagttattcagctcggcacctatgatggctgcatttacaatgcacgtcaggtagttgataagattggtcacctctgcgactacattttcttcgactccgcatgggttggttacgaacagttcattccgatgatgaaggactgcagcccgctgctcctcgatctcggaccggaagacccgggtatctttgttacccagtctgttcataagcagcaggcaggtttctccatggtatcccaggttcataagaaggatagccacatcaagggccaggatcgttatgtacaccacaaggtagttaacaactccttcatgatgcatgcatccacttccccatactatccactgtttgcctgcctcgacgtaaacgctaagatgcaggaaggtgaagctggccgttacctctggaagcagtgcctccacgacgtaatcgaagtacgtaagactgtaatgcgtacctgccattacctccgtccactcgttccgccggtagttcatggcaagaagtgggaagaaggggacaccgaaaagatgggcaacgatatggcttactgggcattcgaaccaggtgctaagtggcacggattcgatggctatgcagaaggccagtacttcatcgatccgatgaagcttcagttcgtaacctgcggcatcaaggaagatggttcctatgatgatttcggtattccaggcaacattctcgctaacttcctccgcgataacggaattattccggaaaagtgcgacctgaatgatattctgttcctcccgaccccgggctgcgacatgaccatgtatgatgaccttgttgctaagttcatcaagttcgaaaaactggttgatgaagatgctccgctggaacaggtactgccgaacatttactacgctcatgaagacgtatatgcaggctggacaattcgtcagctgtgccagtacatgcacgacttctacaagggacatgcaacttctaccattatgaagaagctgttcctgaagaagtacatgccagaatacgtaatgaatccacatgacgctaacatggaactcattggccgtcacggcgaactcgttgacctcgaagaaatcgaaggccgcgtagctctcgaaggtgctcttccatacccgccaggactgctctgcatccagccaggtgaacgttgggctccaaccgtaaccaagtacttccagattctgctcgatggtatcaacaagatgccaggattcgaaccagaaattcagggcgtatacattgaagaaggcgaagatggcaagaagcatgcattcggctatgttctgaagaaggaatatgacccggcattcaagaaataa

SEQ ID NO: 2752 - DNA, 2388 bp, unclassified Dialister
atgatggacaaaagagaaaacgaatatgtattgtggttcgatgaactgcgcagagccgatgtaggtctggtagggggcaagtcttcttcccttggggaactgaccagtgcaaccaaggtgccggtaccatatggatatgctacaaccgctaacgcatatcgttatttcatggatgttaccggacagaacaaaaagattcatgaactcctcgaaggactggacgatgtagaagacagcgtagaacttcacgaagtctgcacacgcatccgtcagagcatcatggacgctgaaatgccagctgacctggcacaggccattgctgattcttatgacgaactggctgaaaaggttggcgaaaaggatccattcgttgctgtacgttccagcgctaccgcagaagatcttccggacgcttccttcgcaggccagcaggatacctacctgaacgtacatggcaaggaagaagtcattcgcaaggttaaggaatgctacgcatccacctttactgaccgtgcggtatattaccgtgcaaagcagggctatgatcatgaaaacgtagcactgtccgctgctattcagatgatggctgactccaaggctgccggtgtaatgttcaccgttaacctggcaaccggcgaagatgactgcatcatgattgaaggctcctggggcctcggtgaatacgtagtacagggaactgttactccggataacttcgtcatcaacaagagcgacctttccatccgttcccgccgtatcaacgaaaaggctattgaactggttcgtctcccaggcggcggcgtagaagaacgcaaggttccggaagaaagagctaaggctcaggttatgaccgatgaacagctgaaggaactggctggctacgcaaaggctattgaaaagcactatggctgctacatggatatggaatgggctatcgaccacaaggaccacatctggattctccaggctcgtccggaaaccgtatggtccagaaagaataaggaaaagaaagaagctaagaaagtgaacatcactaccgatcataaggttctcgttaagggtctcccggcatccccgggcctggtagctggcaaggtacacgtcattaccaacccgaaggacattgaagaattcaagaagggcgaaatcctggttactcagatgacttccccggactgggttccggctatgaagaaggctgtagccatcgttactgatgccggcggtatgacctgccacgcatccatcgtttcccgcgaactgggaatcccatgcgtagtaggtaccaagagccgcagcgtagaagcaacccttaccctgaagaatggtcaggatgtaactgttgacgcacagaacggtatcgtttacgaaggcgttgtaaaagatatggttaagaaggatgaaccgaaggctgccggccagacagtagtggcagcagaatacttcccgccaaccggcaccggcatcatgatgaacctcggtgatccggatctggctgaaaagtatgcatccctcccatgtgacggcatcggcctcatgcgcgaagaattcatctggaccacattcatccatgaacatccgctgtatctcatcgaaaccggccgtgcagacaaggttattgacatgctcgctgaaggggtggctaaggtttgccgtgctatgagcccaagaccggttgtactccgtttctctgacttcaagtccggtgaatacagaaaccttaagggcggcgacaagtatgaaccagtagaaccggctgacctgctcggctggagaggcgcttcccgttactatgatccgaagtacaccgaagcattccgtctggaattgaaggctgtacgcaaggttcgcgaagaattcggcctgaagaacctgaactgcatgattccattctgccgtacggtaaaggaagctgaactggtaaccggcattatgagagaagaaggcctggttcgtggtccggacttcaagctgttcctcatggcagaaattccggccaacatcattctggctgatcagttcaatcagttcgtagatggttattccatcggttccaacgatctgaccatgctgcttctgggatgcgacagaaataatgacacggtatctgccctctttgatgaacgcaacctggcagtgaagagagccatccgtcacctcattgctactgcacacaaggatggaaagaccgtttccatctgcggacaggctccgtccgtatatccggaattcactgaattcctcattaagagcggtatcgactatgtatccgtaaacccggatatggttaaggcaaccaagagaaatgctgcacgcattgaacagagacttatgctggatgcagctaccggccgcggaatcaaggaagtagaagactacacctggtaa

SEQ ID NO: 2753 - DNA, 3846 bp, unclassified Dialister
atgagtaatgtcagatggacagaagaacaggaatcagccatcacttcccgtgaccggaatcttctgctttctgctgctgcaggaagcgggaaaacagcggtactggtcgaacgtattatccgcatggtctgcgatgtggaacacccggtaaacattaccagtctgcttgtccttacttttaccaaagcagccgcttccgagatgcgcacccgcattactgacgcactgaccagagtactggaaaatgcagaaaaagaaggaaaggaggctctttcttcccatgtgagccatcagctggccctgatgggcagtgcccatatttccactattgattcattctgtcagactctgattaagcagtatttttaccgcatcccgctggatccccgatacaggattgaaagtgattccgaagtactgtatctgatgaagcaggatgtcctttctgatgttctgctccggtggtacgaaaaaaaggacccagattttataaagctttccgatatgcttgccagccggtatcaggatgggcagttgcgtcagattatcatgaagctggattccttttcccagtctatggcttttccggaaatctggctttcccatctggcagatgcctatgagctggctccgggcacaaccttgtctgacctggactggactgatattctcctgcaggatgcccgcattcaggtcacctcctggtgtgataattaccgcctcctgttcgatgctctgcagccatatgccttccagctccagaaatacattgagccactaacgcaggaatacactcagctgaatctgctggccgaatcctccacctggcatgactggcagaccagaatccagtctgtttccttcactccccgtctgccggccatccgcctgggaaatatggataatccggatgaaataaaaaatataaaggatgctgtaagtgatgcccggacaaaaataaaaaaggcttttgcctcacttcagtctttcttctctatcccggaaaaggcctggatttcgcagatgcggggaaccgctccccttatccgtgtccttgccaggctgacacaggattttcacgacgcttacatgcagaagaagcaggaggaaggtattctggaattcagtgacacagagcactatgccctgacccttctggttgatcagaaagccagtggctttacaccatccagagctcagctgtttccttccataactgccctggaacttcgaaagaattatacagaagtgatgattgacgaataccaggatacaaataatgtacaggaaaccattaccgccctgctgagctccggtcataatcggtttatggtcggcgatatcaaacagagtatctatcggttccgcttagctgatcctacgattttctatgataaatataaagactatgttgcagaaaccggctcccagaatcttcgaatcgatctgaaccgcaatttcagaagtgacccgtccatcctttatggtattaactttattttccgccagatcatgtttgaagatagtctggaactgaactatggtaagtcagaagctctgtatccgggaagaagcacctgcaccgataaaacgtacgtgggtggcactatagacattgatatcctggaaaagccggccacaaaggatatggatgagtcagaggccgatgagatgcaggatgtacagcgcatagaactggaaggtgtgcacattgcccaccgcataaaggatatgctcaccagagggctgactatacgcaataaagccggggaaatacaaccggtttcctataaggatatagtcattcttatgcgttccatcagcaccaaagccggttatctggtccgcacactgcagaatgcagggattcctgccatctgtgatcagagtgatgattttctggaaaccgtggaagtgcgtcatctctggtcccttctgcagattctgaacaacccgcgctgggatatccccatgacggcaatcctccgctcttccctggtcggactggatgaacaggatttagcccatcttgccctgaccagagacagtatgcaatccccggtttccccctgtctttttgacgttctcataaaagcagaatccccactgccgtcggtaaaacaggaaaaggtagcggccttcctgaaattatttaataaatggcgttccctttccaggcgaaacggagtggctccgctactccgcaccattctggatgacacagaatatctgccttacattgccgccctgccggaaggcagcttccgggctgcccacgttgaagcattctatcaaaaggccctcgcctgggataacagccggaataatggcctgtatggattcctggacacgcttcatcgtctgtcaaaagagcgcaaaaaactatccgcttcttctgtacagacagagaccgatgcggtgcagattatgacaatccataagagtaagggattggaatttcctgtggtatttcttgccgacgccgcctgtcagttcaacacggatgacctgcatcagtcagctctgctgcacaagacagagggaataggattccagtattttgatgaagaacataaactgcgctggcctacgctctactggtacctgttaaaacacaccatgcagcgagaaaatctatcggaagaagcgcgcctcctctacgtagccatgacacgggccagagataagctgattatcaccggcaccgtaaaagacgtgcagaatacgatgaaaaaatggagcataccgttgcatgcgcgcaccacggttcctcatgccggctaccacagaatgcctctgcatactataacttcagctacctgttatatggactggattgtaccggctgcagcagtaagccgctccatggctaccttctgggacataatatcctccataccgatatatgaagacgaatccgacacgcctccgcagtttgccattcatatcatttctcctgaagatctcctcccggagctgatatctgacgacagccatgagaaagatgacgcaaaggatatagatgccatgctaaaggactatctgtcacgctctggtccggttccaccgtggacagaaaacaccttatcctggaagtatcctcaccccggctctatcagcacaccggcaaaaattacggccaccgcagccgcccgtatgttatttgagcaaaatgaagaggaaccgcagtcagtggtacttacagaagaacttaccgaagaagagacatacctcccttccggttttacggaggaaccggcctttcttgccaaagaccgcctgggcacccacggggcggcttatggtaccctcatgcataaggttatgcaatacctggattttaagacggactatccgtcgtctgacttcctccgtgaggaaattcacacgctgcatgaacgtaatatcctcaccgatgacgaagaaaaagccatcctttcccgttccggattccattccccggttcaggatatccttgcctttcttcatggcccgctgggaaaaatggccagaacctctcttgttcgaaaagaactgccattctccattcttcttcctgcgcaactgttttatgagtcctgcgaaccagaggaaaacattttccttcagggtgttattgactgcctgttggaacaggacgataagctgattatcatcgattacaagaccgattttgccagaaccgaagaagagctaattgctcattacgcagttcagctgaacctgtatgcttatgccatacaacgcatttatgctatgccggtatctcatatgtatctctggtctttccgactgaaaaaagctatcccgattccctttcatcgccgcaatctccgcaccatataa

SEQ ID NO: 2754 - DNA, 3708 bp, unclassified Dialister
atggggaaatatcgccttaaggtaaaaggcggaaaaatgccttttacctttatggaaattgatactgactgccacgcgtggtatatccatgcggatagtaccgaagcggcagtccgttgtttatgtgatatggccggggaactgcagggaatagattccttttatgtcaatggggatgacgttacagaaaaagtagcggacgcctgcctccggattatgcaccagagacagcaggaagccagtgatataccgctgccggaagacgaagattatctgggaggaggtatggacctgtccatgcctcctctgggggaaccagctgacattccggtggtacctacgctggatgatatccgaaaggcggaatcagcagctggcccggcgccggaaaaacaggagaattccatgccttctgtgtcaactctgccttctgatctgcctaaactgtctaatgttatgccagaagccatggtggtgagacacagtgctccggcaaagggcaagacggaaaattccggtgacatgctcatcggaaagaaggctataaaagggaagattaccaaggtcagagatctgcatggggaaatggataatgtggtacttaacggtacggtggtatcttcagaattcagagaacttcgggacaaccgcctgattttcaccatgaaatttgccgatgataccaacggaatcaactgcaaaaaattctatgatagtgccgatgacgccgcaggcctggtaaaggctatggaaaaggcgaacggcatgccggttagggtcagcggcaatgtgcgccttgataaatataccggaggttatgttctgaacatccggcagatggaaaagagttctctggaaaaaatcagtcatgaggataattatccggagcccagagtggaactgcatctgcacactaagatgagcctggatggtcttatcgacctgaagcaggtgattaagaccgcggcggcatggcatcatccggccatcgccattaccgatcatggggttattcaggcattcccgaagattcaggatctggcccgccagtttgatcagaaggtcatttatggcatggaaggctatctgatccaggatattccggagaatattgatacagaccgccagaagtatcaccatattattattctggctaagaatatgaccgggcttcgcaatctgtaccggctggttaccctttcacacctcaagttttaccgtaaacgcccgcttctgcccaaacctctgctggaggaactgcatgaaggcttaatctatggctccgcctgcgtagtaggagaattttttgaagcggttctggaaggcaagtcagatgaagaactcatgaagattgctcgattctacgactatctggaagtacagcctgtgggaaataattcgttcctgattaatgacgataaacatccggatataaccagcattgaagatttacagaatctgaacaggaaagttgtggaaatcggagaaaagacggggataccggtatgcgctacatcggatgcgcattacatgttcgctgaagatcagacaaaccgggatatccttctctctacctgggaaaagccaggtaagctggattcccatccgccggtatacctgcggaccacacaggaaatgctggatgaatttgcctaccttccacaggaaaaggcaaaggaaatagtagtggacaacacacggaagattggggagatgtgtgaacgactggaacctctggccgaagaatggaaatcgtacaacccgaagatttccggggccgacgaagaactgctgaaaatgtgttacgacaatgccaaagccatttatggggatccgctcccggatatcgtaaaggaccggttggaatcagaactgaaaccgattgtcaagcacgggttcggcgtattgtacttcattgctcataagctggttaaacattcgaatgaccgcggatatctcgtaggttcacgaggatcggtaggttcttcctttgtcgcgaccatgtcgggcattacggaagtaaatccgctgccaccgcattatgtatgcccgaaatgccactggaccaaattctttacggatggttccgtaggcggcgggtttgaccttccggataagccatgccctgaatgcggcaccagcctgaataagaatggacacaacattccattcgccgtattccttggatttgatggagataaggttcctgatattgatctgaatttctcgtcaggcgatgatcaggccaatgcccataaatatacagaagaattgttcggaagagataatgtattccgagcaggaactatcgcaggtattcaggacaggacggcctttggtctggttaaacgttatgcggaaaacaggggacttacctataatgatatctttattgaaaaactggcttccggtgtactgggggtaaaacgtacgactggacagcatccggcaggcatcatggtttgcccgagagatatggatattcataattttactcccttgcagtatgcagctaataagaagtatctgaagggagaaaacggggaaaagattcccggaacgataacgacacatttcgactatcattctatttcaggacgtatgcttaagctggatattctcggacacgatgatccgaagattattcatatgcttcagcacattaccggagtggatccgatgaagattccatttaatgatccggatactatttccctgttcagctctacagaagctctgggatatactccggaacagcttcgggacaccattggggacaaaggctatactgttggtgcgctggggctcccggaatacgggacgcctttcgtacgtcagatgctggaagatacaaaacctcagaatttttcacagctggtacgaatttccggattttcccacgggactaatgtatggctgggaaatgcacaggacctgattaagtcaaaaactgttaaactggaagaggctatttctactcgtgacgacgtcatgaactatctgattgaacatggggttaaaccgcttacagcgtttaaggttatggaaaatgtccgtaaagggaagggccttgaaaaggcagataagacaggtaagatgtcgaataacagggcggaaatagaggcggcccatgtacctaaatggtttatcgattcctgtcttaagatttcgtatctgtttccaagggctcatgccgtggcctatgttatgatggcgttccgtattgcctggtttaagattaattatcctctggcattctatgcgtcttactttaccattcgtgctgaagggtctttcgacgcgcttaccatattgaaaggatttgaagcacagaaggcagaacttcgccgtatagcagctctcgaccatccttccaacgtagaaaaagactgtgctacggtcattgaagtggcagcggaaatgtatctgcgtgggtatgaatttatgcctatcagtctggaaaaatcgagtgctactgaattcttgattttggataacaagattttgccgccatttaactgtatccccgctctgggagaacaggtggccaaagaaattgtggaagccagaaatgaagcgcctttctcgtctaaagaagatttacgtaagcggggaaaggtaagtcagagtattattgataccatggatgaaatgggaatattgaaaggacttccggaagaagagcagctgaacctgtttgctttctga

SEQ ID NO: 2755 - DNA, 2577 bp, unclassified Dialister
atggaaaataaattagtaatcattgatggaagcagcctcctttaccgggcattttatgcgcttccgccgctgtctaaaaatggcgtttacaccaatgcggtatttggttttctgcggatgcttctcagcatttaccgtacactggatccggaatacatggctgtatcttttgataagagcagagaaacgttccgcacaaagatgtacagtgagtataaggctacgagaaagccggcacctgacgaactggtacctcagtttgcgctgattaaggaagtactgcgggttatgggggttgctgtatatgagccggaaggatatgaaggggatgatgtccttgggacactgtccagacggtatggggacagccttccggtttatattgtcaccggggacagagatgctctccagctttctgatgagcatgtcaccgtgcttcttacccggaagggcatttctcagatggatgccatgacgcctgaggcggtaatggaaaaatatcagattactccttcgcaggttattgacatgaaggccctcatgggcgatgcttccgacaatatccccggggtgcggggcgtaggcgaaaaaacagcgctgaagctgatcacccggtataagacactggacgggatttatgaccatctggatgaaatcaaaggagcgctccataagaagctggaagcagataaggaagccgcttatctgtcatatgacctggcaaccatccgccgggatattccgctggaatccactctggatgagatgaaacagccggtgcacctggatgaaatgaacgctctgttccgtcgtctgggcatggataccatggtcagtgaattcagccggctgccacgatttgaggcgctggccagagaaaagaaagagcagacagcgacacagattaaagaagcggagccatggagtgaagatatctccgtggaaggggagacactggcgctggttattcccttcaccggtacggctccttttctgcaggctccttttgtcatgattgtttctcatgaccatgtatggagagcggaaaaggaacagtttccgcaggtacagaaagtcctgtcaaaggcggctcatgtggtggtgatggacagcaagaaactgtgggaatcggatttccctctgcatggacttgcgctggaagatatttccctttctgcttatgtcctgaacccgggacgcacggattatccgctcagttacctggcggaattctgcggtattgatccggtatatccggaacagatggaaacgccggaggaaagcggcgcggttaccgggacattcctgctctctgtatatgcgcatcttgtgccggaaatggaaaagaacggcgtagacgcactgtacaggaatattgagcttccgctggtggaggttctggccgctatggaaaaggcggggattgctactgatcagaaacgatggaaagaagttctggaagatatgcagcagagagaaaggcatatccttcgggaaatctataccgaagcgggagaatcttttaatgtgaattctccccggcagctctcgtatatactttttgataagatgcatatgccggcagggaaaaagaccaagacggggtactctaccgccgcgtctgtactggataagctggcggaaagttatccttttgtaaagaaaatcctggaataccgtacgttgtccaagcttatatccacatacctgctggcgctgccggaactgatccgaccggaaacgggacgtatccatacctcgtttaaccagacggttacggctaccgggcggctctccagctcaaatccaaatctgcagaatataccggtacgtacagaagaggggaggaaaatccgctccctgtttgttccgggagaaggatatgactgttttatctcatccgattattctcaggtagagcttcgcgtactggcgcacatgtccggagatccgggactgattgcggcatttaataataaggaagatattcaccggcgtacggctgcggaaatcatggggattccttttgaagaggtaactccggaacagagatcgcatgccaaggcagtaaattttggtatcatttacggtatcagtgactatggactggcacgacagctcaatatcagccgtgaagcagctgccaggtatatgaaatcctattttgaaagatatccgcatatccatgaatatatgcagaccatgattgagcaggcgcgtaacacgggccgggcggtgaccatgttcggcagatacagggagttaccggatattcattctaagaatttcaaccggcgctcctttgccgaaagaacggcgatgaatactccgattcaggggacggcagcggatattatgaagatagccatgcgtaatgtatataaaaagatgcaggctatgggatgcaggagccggattctgttacaggtacacgatgaactgattgtagaggcagttaattccgaaaaggaaatgctggagaaactgctgaaggaaaccatggaacaggcggttaaactgcgtgttcccctggttgctgatgtacatacaggcactaactgggccgagacaaagtaa

SEQ ID NO: 2756 - DNA, 3720 bp, unclassified Dialister
atgccgcatctgctcgaccttcagaccaagtcatatgcatggtttcagaaggaagggctgaaagatgtcttcaatgatatttccccgattgaagataacgcaaagaaatggtccctgtattttgggaattactatttcggagaaaagaaatacagcattgaggaatgtaaggcaagggatgcaacatactctgccccgctccaggtagatgtaagactggtaaacaaagacaccggcgaaatcaaggaacatgaactgttcatgggcgatttcccgattatgacggataccggtacatttgtcatcaatggtgcagaacgtgtcatcgtatctcagctcgtccgttcccctggcgtttatttcaaacgcgaacaggatacttacggcaagatgatttattccggacagattattccaaaccgcggcgcatggattgaactggaatccgatgccaacggcgcactgtctgttcgtattgaccgtaaccgcaagatgccggccactgtacttgtacgtgcattgggtttctccagcaatgaagatattctggaactgtttgcccatgatgtacacattgaaaagacactggaaaaggatccatcccgtaccacagaagaagcgcttattgaaatatacaagaagctccgtccgggtgaaccggctactgtagacagcggtacaaccctgcttcacaatttcttctatgatccgcaccgctatgacctggccaaggtaggccgttataagctgggcaagaagctgggctggaagcatcgtctggaaggacatgtcattcaggatcctatcgttaatccggaaacaggagaaatcgtcattgaaggaaactcccgcattgacagcgatgccatcaagcgcatcgaagaaagcggagtatttgcaggagaaggcccggtagtagttacccttctcaaggatgaaggtacaccggttaagattatctgcaacaacagcaatctggacgataatttccgtacactgaccagagaagacatcatcgcgttcatcgactacagcctgaacatgatgcagggctttggtgaagcggatgatatcgaccatctgggcaaccgccgcgttcgtactgttggcgaactgctgcagaatcagttccgcatcggtctgtcccgtattgaacgtgtagtccgtgaacgtatgactacacaggatcaggacaagatgacaccgcaggcactggtaaacatccgtccggtagtggcagctatcaaggaattcttcggttcctcccagctgtcccagtttatggaccagaccaatcctctggttgaactgacacacaagcgccgtctgtccgcattgggacctggcggtctgtcccgtgaacgtgcaggcttcgaagttcgagacgtacattactctcactacggccgcatgtgcccggtagaaacccctgaaggtccgaacatcgggctgatttcctctctgtccaactacggtatcatcaacaagtacggtctgattgaaactccgtaccgtcttgtagaccctaaggatcaccatgtaaccaacgaatgccactatgtaacagccgacattgaagaaggcaagattattgcacaggcatctgaaccgctggatgaacatggattcttcaagcataagaacgtagccagccgtcgaggcccggacgttctggaagcttctccggaagaagtagtactcatggacgtatctcctaagcaggtcgtttccatcggtacttccctgattccattcctggaacacgacgataccaaccgagcactgatgggtgcaaacatgcagcgtcaggctgtgccgcttctccgtccggaagctccgcttgtcggaaccggtatggaatttaccgcagcacaggactccggcgtatgtatcctcgctaagcgcgccggcgtggtagaacacgtaaccggccgtcagattgtcgttaagaccgacgatggtgacgaagacgtttacccgatgattaagttcatgcgttccaaccagagtacctgcgtaaaccagagaccaatcgtatacagaggcgaccgcgtagaagccggccagacactggctgacggcatggccaccgatggcggcgaactggctctgggacacaacgtactggtagccttcgttgcatgggaagggtacaaccacgaagacgccgttctcatttctgaacgactcctcaaggatgacctgtacacatccatccacatcgaagaatacgaatgtgatgcccgggacactaagctgggcgatgaagaaattacccgtgaacttccttccgtaagcgaagaagctatcaagaaccttgatgaagacggtattatccgcatcggtgctgatgtacgtccgggagacattctggtaggtaaggttaccccgaagggcgaaaccgaactgacaccggaagaacgactcctccgcgctattttcggcgacaaggaaagagaagtacgtgatacctccctccgtgttccacatggcgaattcggtaaggtagtggacgttaaggtgttcacccgtgaaaacggcgatgaaatggcaccaggcgtcaacaagctcgtacgcgtatacattgcacagaaacgtaagattcgtgaaggcgataagatggcaggccgtcacggtaacaagtgcgtatgctccagaatccttcctgtggaagatatgccattcactccggatggacgtccggttgatctggtactgaatcctctgggcgtaccgtcccgaatgaacatcggtcagattctggaaatccatctctcctgggcatgccatatgctcggtgaaagaattcaggaagccaagcataatccggaactggctaaggaactggaaagacagctccgcgaagacggatatgacttcgataagtatggcatgccggaaccagatgaatccggtatccacattgccaccccggtattcgatggctgccgcgatgaagacctgaacaagacactgagtctggcaggactgccggcagatgccaagaccgacctctatgatggccgtaccggtgaaaagctggatggccgcgtaaccatcggctggaagtacatgctcaagctccatcacctggttgatgataagattcatgcccgttccactggtccatactccctggttacccagcagccactgggcggcaaggcacagttcggcggccagcgtttcggtgaaatggaagtttgggcgctggaagcttacggcgcagcttatacactgcaggaaatgctcaccatcaagtccgatgatgtcattggccgtgtaagagcatacgaaaagattgttaagggcgaaaatatcccaagtccgggtgttccggaatccttcaaggtattgatgaaggaacttcagtccatcggtctggatgtaagaatcctcaacgaaaacggcgaagaagttgtgatgaaggaactggatgaagaagacattgaagctaacttcatggaacatcatcacaaggaacacaaggatgaacataaagaagatatcaagcagctcattgaaggtgatacgggtgtgaccgaatcacgtaaagcatttgaaacaggaatggccggaaatgcacagactgcagcaaacgacgtagcttcctttacggaaaccgccgaagctgaagtatgtgcaccggacggagatgcagatacttccgtactgattactgatgaacatggtcagctggatgaccatagtgaagaataa

SEQ ID NO: 2757 - DNA, 4293 bp, unclassified Dialister
atgaacccagtacttcatgtgggtatagatatcggatctaccacaatcaaagcagcagtgctttctccatgcaaagagctgctctggggcacgtatgtgcggcatatgtctgaaataaagaaagccgtactttccacactggacgaaatccagaaacgattccccggtcacagaatcaccgctgccatctccggtagcggcggtatgggacttgcctcccgctttcagattcctttttatcaggaaatccttgcggagaccaaagcggtccgcacatttattcctgacgccgatgtcatcattgaactgggcggtgaagacgaaaaaatcacttacctgagaaatggtgtcgatcagcggatgaacggtgcctgtgccggcggtacaggggcctttatcgaccgcatggcctctctgctttctaccgatgctgcaggtctggagaaactagcccagcagtcggagcacatatatcctatcgcttcacgctgcggcgtattcgccaaaacggatgtacaggccctgcttaatgacggggcaaccagttacgatattgccgcctccgttttccaggcagtagtcaaccagacaatttccggacttacctgcggacgccctatcaagggaaaagtcgtattccttggcggtccgcttacattccagccattcctcagagcctgctttaccaacacgctgaatctctctccggaaaacgcagtccttccggaacacagcgaactgtatgtagccataggcagtgcgctggccggtatgcataataagcctttcgcgctggatccatggctggaatccatacataagtccgatctttcggaaaactccaaagtaaagaccctccctccgctgttccgctccgaagaagactatgaggcattccggaagcgccacgcggcccatcatgttccctgcgactcgctggcggatgccagaggggctgcctggctgggcattgatgccggttctaccacaatcaaggctgccctcatcaatgagaaaggccatctgctgtatcagtggtacagcagtaatcacggcaccccgctggaaggggctaagaaaatcctttcccagctgtatgaactgatgccttccggcctgcacattgccggaaccggagtaacaggatatggggaagacctcataaaatcagctctgaccctggatatgggcgaagtggaaaccattgcccactaccgtgccgcagttcatttctgcccggatgtgaccaccattcttgatattggcggacaggatatgaagtgcagccgcattaagaatcattctattgacagcattatgctgaatgaagcctgctcttccggctgcggatcttttctggataccttcgcccactccctgggtatggatatccgggaattctcaaagattgccctgtttgcggagcatcctgtcgatttaggttcccgctgcactgttttcatgaactcccgtgtaagagaagcgcagaagaatgctgtttccgttgctgatatttctgcgggcctgtcttactctgttatcaaaaatgcgctgtataaggtaatccgccttcacgatgcgtcggaactgggaaataaggttgtcgtacagggaggaaccttctataacgacgccgtactgagagcactggaaaatctgctgggctgccaggtaatacgtccggatatttccgggcttatgggcgcttatggaatggcccttctggcgcaggaccatttcgcagctgatcatcactcctccctggccgggccggaaatcatccgtaccctcaccatggataaccacattcagcgctgccctggctgcggtaatcactgcatgcttacggtcacacgcttctctgatggccgggcatttgtaaccggtaaccgctgtgaacgaggggcctctctggcgctgacagggaaatcagttcctcactccagtctccccaatatgtaccgctggaagatgcgccgcctgttttcttatcggccgctcgcccacccttccaggggtacggtaggtatccccagagtgcttaacatgtatgaggattacccattctggcacacattctttaccagactgggtcttcgagtcattctttctccctatgatatgcgggatatgccaatggaagcgatggaaaccatcccttcctactctgaatgttatccggccaaactggtacatggccatatctaccggctgctggaacgccatccggacttcatctggtacccctgtgtggataagggaccagacgaaggcagtgaaaacacattcatgtgtccaatggtcacttcctacccggaaaccattgccgccaatatggatggcattctctccgagaaaaatataccattccttcatccattcctgcccatgcagaacgaaaaggtactggcccgccgtctgtatgaagccctgcatttcctttcggtttcccattcagaaatcagaaacgccatccaggctgcacgtaaagaacaggagtcgtatcgtcaggacctgaaggaaaagacgctgtcgatcctccatgagatacaggaaaagaacctcaccggaattgtactggccggcagaccctatcatctggatcctaccgtacatcacggcatccctgacctgattaaccagctgggaatggccgtcctctccgaagatgggatttccatgctgaacagggaaattccaaacctcagagtactaaatcagtggtcatatcataaccgcctttataaggcagccgactttgtaacccggcataagaatctggagctggtggaacttaattcgttcggttgcggcctcgatgccatcgtaacggatcaggtacaggaaatcatgtcccagaggaaccggctgtacacagcccttaagattgaccaggggctgaaccttggcgctgtgcgcatccgtctccgttctctgaaggccgctatttccaaccggacttacggggacgggaaggtcgcccctattatgtattcccatcctatctatacgccggaaatgaacgcagaatacaccatcctcgttccggagatgtcacccgtacatttcccacttctggaagcggcaggccgtgcctccgggtataatcttaaagtcattccgccagtgcgtaaggatattgatgtagggctggcttcagtaaataatgatgcctgctatccggccatcattaccatcggctcactgcttcgctcgctccagtccggagaatatgatttatccaaaaccgccgttatgctttctcagacaggaggcgcctgcagagcatccaattatatcggcatgctcaaacgcgcccttgcacgttccggattttctcagattccggttatttcccttaatatgcaggggctggacagacaaccggggtttgaacttacgcccgctttcatgcggcgtatcatccgggctctgattttcggggatgcgctgatgcagtgtctcctccgggtgcgtccatatgaagcacttccgggagcagccgaccggctggttaaggcatggcagaagaaattcattgactgcagctcccacggcaagttcacttaccgcacatacagtcagcttctgaagcatatgatttccgagttcgatcatctgccgctgactgcagaacagtcagtaaagcccaaggtcggagtggttggtgaaatttatgttaagttcagccctattgcttccaatgatattttccacgccattgaacagaatggaggagaagtcgaggccggcggcatgattgacttccttctttatggccttatggacagccgtttccagcataaatatatgggcggaagcgcgctgaaggatctgaaggacacattcctccgtgaacttatcgaatggtatcgccgcccttatgaaaaggcaattaagcaatcccgccggttccatgcgctgacccctatcggcaccatgtataaaaaggcatctcattacttatctctgggacaccgtgccggagaaggctggttccttaccgcagagatgattgacctgcttgctcatggcgcaagaggtattgtatgcctccagccatttgcctgcctgcctaaccacataaccggcgaagggatgattcacaagctccatcagtcgtatcctgaagctgtattcctttctctggactgcgattccagcgccagtcaggtcaatcagctgaaccgtctgaaactgatgcttaattcctttacagaggaaactccggaatcagatgaaagcgctattctccacgaagtcattgccaccacgaaaggatctgcattatga

SEQ ID NO: 2758 - DNA, 3432 bp, unclassified Dialister
atgaaaaagattaacaagatactcgttgcaaaccgaggagaaatcgctatccgcgtattccgagcctgtaaggaactgggcattcgtaccgtagctgtttattctgaacaggatattctgtcccttcacagaaaccgtgcggacgaagcgtatctgattggcgccggtaaaggtgcggtagaagcctatctcgatattgaagatattatccgcgtagctaaggagcataatgtagatgctattcatccaggctatggtttcctggctgaaaatgcagaactggctaagcgttgcgaagaagaaggcattattttcatcggaccacatgtagaacatctgattatgttcggtgataaggtcaatgcccgcattcaggctaagaaggccgatattccgatgattccaggcagtgatggcccggttaccacctatgaagaagttaaggcatttgctgaaaaggtgggcctgccgattatgattaaggctgtcaacggcggcggcggacgcggtatgcgtaatgtagaccgcatggaagatctggaatccgcttttgaacgtgctaagtcggaagcgaagatggcctttggcgatgaagatgtttatcttgaaaagtgcatcatgaacccgaagcacattgaagtgcagattatgggggatgaacatggccatgtggtacaccttttcgaacgtgactgctccattcagcgccgtcatcagaaggttattgaaatggctccggcatggtccctgccaaaggaactgcgccagcgcatctgtgatgctgcagttaagctcatgaagaacgttaactacgtcaacgcaggtactgtcgaattcctggtagaccagaacgaaaaggatttctacttcatcgaagttaatccgcgtatccaggtagaacataccgtaaccgaaatgattacggacatagatattgtaagaacccagatcatggttgcagaaggctatagccttgatgatccggaagtaggtattggtaagcaggaagatatctggtacaagggcattgctctccagtgccgtattaccaccgaagatccggctaataacttcatgccggataccggtaagcttattgcctaccgttccggcggtggtcctggcgttcgtctcgatgcgggcacggcttacaccggtgctgtcattactccatactatgactccctgctggtaaaggttaccgttcatgcactgaccccaagaagcacattcagcaagatgctccgctgccttgatgaattccgtatttccggggttaagaccaatatttatttcctccagaacatgctccgcaccgaggacttccagaaaggcctctgcgatgtaaactatatcgaccgtcatccggaactgctggttgacccgaacattgtaggcgaccgcggaacccgtattctggattacatcggcgaaatcaccgttaacggctatgcaaatgctggccatcaggctaagccggattttgaaccggcacctcgtctggatgctgaccatctggaagcaccggctggcacaagacagctcctgcagcagctgggaccggaaggattctcccgctggattcaggaacagaacgaagtacaggttatggataccacttatcgtgatgcccatcagtccctgctggctacccgtgtaagaacccatgatattatgcaggctattcactacactgcatgccatgtaccgaacctgtatgcatttgaaaactggggcggcgcaacattcgacgtagcttatcgtttcctcgatgaaagcccgtgggaaagacttcgtcagatgagagaggcagctccgaacattctgttccagatgctgacccgtggggctaatacggtaggatataccaactatccggaaaatgtagtccgtcagtttattgaccgtgcagcagaaaatggcatcgatgtattccgtgtgttcgactgcctgaatcagctgagccacatggaagttaccattgatgaagtaagaaagctcggcaagattgcggaagcgaccatctgctacactggcgatatcatggatccaaaccgtcagaagtattcactccagtactatgcaaacctggctaaggatatggaaagggcaggggctaacatcattgccatcaaggatatggctggtctgctcaagccggaagccgctactgcactggtatccacattgaaggatgcagtagacctcccgattcacctgcacagccattccggaagcggtaccatgctctacacctatgccaacgctgttaatgccggcgtagacattatcgacctggctacatctgcgctgtccagcggcaccagccagccgtctatcaccgctatgtactatgcactccagaataacccgcgccagatgaacttcgacgtgaaggaactggaaaagattgaccgctactggcaggcagttcgtccatactatgccggtgtggatgcgaagatgacctatccaaacaccaccgtgtacgaacacgaaatgccaggtggacagtattccaacctccgtcagcaggctaccgcagtaggccttggcgacagatggctggaagtatgcgaaatgtaccataaggtcaacatgatgttcggcgatatcatcaaggtaaccccgtcctccaaggtggtcggcgatatggccctcttcatggtacagaacaacctgacagaagaagatatttatgatcatggtgataccatcgacttcccgctctctgtagttaacttctttgacggtaagctcggtattccatatggcggattcccggaagatctgcagaagattattctccgtggcagagaaccgcatctggaaagcaagccggctgatgtagatttccacaaggtcgttcaggaaatggatgacaaggaaattccaatcagtgatgataacatttcttcctactgcatctatccgaaggtattcagcgactacgtaagaagatacaagcagttcggcgatctgtccgttctggacaccccgaccttcttcttcggtatgaacccgggtgaagaagtacatgtcaacctggaagaaggtaagatgcttcttatccgtatggacaacattacccgtccagatgaaaacggcgaccgcatcgttcagttcgaactcaatggtatgccgcgtgaaatccgcgttcatgataagcatgtagaagattccgctattgaaatcaagaaggctaatccagacgtaccaggcgaagtaggggccaccctctccggcaaggtagtcaagatcctggtagctaagggagataaggtagaaaagggcgatccaatcattgtaaccgaagcaatgaagatggaaaccaccctcacggcaccggtaagtggcaccgttaaggaaattgccaccgcaccgggtactccgattgaatccggagacctgctcctggttatcggagaataa

SEQ ID NO: 2759 - DNA, 1761 bp, unclassified Dialister
atgtatctggaaaaaatcaacagcccagaggatataaaacaatataccgcccaggacaggaaaaagctggcggaagaaatgcgccaggccatcattcagcgggtaagcgtacatggcggtcatctgggacctgatctcggttttgtagaagcatccattgccctgcataccgtttttaactcaccggaagacaagattgtatttgatgtatcccatcagtgctaccctcacaaaatgctgactggacgcagtcaggcctacctgtccccggaacattatgacgatatctccggatataccaatccggatgaaagtgaacatgacttttttaacgtaggtcatacatccacttccctctccctggcctccggactggccaaagccagagacctgaaagggacgcatgaaaatatcatcgccgtcatcggcgacggatccatgagcggcggcgaagcgctggaagggctggatactatcggagaaatgggcaccaacctgatcattgtgttcaatgacaataatcagtccattgccgaagtgcatggcggcatgtataagcagtttgccaaactcagagaaacccatggacaatatccgcacaaccttttccgggccatgggtctggactaccggtttgttgaacatggcaatgatacggaagaactgatccgtgtattcagggaagtaaaggacattgaccatcctatagtgattcacgtagtcacccgtaagggactgggatataaaccagcagaagaaaacaaggaaaaatggcactcctgccggggatttaatattgctaccggtgaaaaaatcggaaaaggtccaaatccgtactttgataccacctcttcctatctactgcaccgcatgaaatgggaccacagactggccgctattgctgccgccactccatccaacttcggatttacccccgataaacgaaaggaagcaggcaatcagtacattgatgtaggtattgcagaagaacaggcagccgctatggcttccggaatggcaaaaaatggagttcatcccgtatttgccacatctgccaccttcttgcagcgcgcctacgaccagatttcacaggatgtatgtatcaacaacaatccggtaaccttcctggtcacctgggcagggtttgaagcaatgaatgatgtgacccatctgggaatctttgatatccctatgctcacctccattcccaatctcatttatctggcccctacttcagtggccgaataccgggccatcctggactggtcaatcaaccagaaggaacaccccgtagccatccgtgtcccgctgcccatgttcaccgactccgacagccctgtacagagttcatatgaccgactcaaccagtccctggtaacccacagcggaaaagacatcgccatcctgggtgtcggcaatatgtatcatgtagccagaaaggcagcagcccatctgaaagataaggggctggatgtcaccataatcaatccgcttttcctttccggactggatacacagctccttacccagctcatggacagccaccgtctcgtcgtcacactggaagacggcgttctggacgggggatttggcgaaaaagtcgccgccttctacggtccaaccactatgcgggtaatgaacttcggactgaaaaaggaattccgtgaccgttatgaccggcaggaactggcacaggaaaatcacctcacagaagagcagattgcttccgacgtatgggacgccttctgccagctgaaataa

SEQ ID NO: 2760 - DNA, 2469 bp, unclassified Dialister
atggtagacaaatacgtacctcaggaaattgaaaaaaagtggcagaagaagtggctggaagataaggcctttgccacgaaacaggatccggacaagaagaaatattatgttctggaaatgttcccatatccatctgggaatcttcacatggggcatgtaagaaactattcaattggcgatgtggttgccagattcaagaagatgcagggattcaacgtcatccatcctatgggatatgatgcttttggtatgcctgctgaaaatgctgctatcaagcatggtattgctcctgcaaaatggacatattccaatattgaaaacatgacccgtcagcagagagaactgggattgtcctatgactgggacagagaagtactgacctgtcgcgaagattactataagcatacccagaagctgtttgaaattttctataagcgtggactggcttataagaaggaagctaaggttaactggtgcgacacctgtcataccgttcttgccaatgaacaggtagaagaaggcagatgctggcgctgtaagaatccggtagtgaagaagaacctttctcagtggttcttcaagattactgcctatgcagacagactgctcaaggatttgaataagctggaaggctggccagaacgcgttaagaccatgcagaagaactggattggccgttccaccggtacacagttcagctttgcagtggaaggcatggaagacagaatcgaagtctacacaacccgtgttgataccgtatacggggtgacttatgtggttctggctccggaacatcctctggtttccaagttgattgcaggaaatccggaagaagaaaaaattcgcgcctttattgacaaggtaaagaatgaaagtgatattgaccgtacagcggaaggtgccgaaaagctggggatgtttaccggaagctatgcaatcaatccgatgaatggtgatcgtgttccgatctggattgccaattatgtattgtatgaatatggtacaggtgccgttatggctatgccggaaggcgatgaacgtgactgggaatttgctaagaaatacaacctgccggtaaagattaccattcagaatccggaagggtccctgaagctggaagatatggaaaacgcatatactgaggaaggtgtgctggttgattccggggaattcaatggattgagcggcaatgaagccagagaagctattatccgtaagatggaaaagatgggcataggcgaagaaaaggtaaactatcgtcttcgtgactggctcatttcccgtcagcgttactggggctgcccgattccgattatcaactgcccggattgcggaccggttctggtaccggaaagcgatctgccggtaagacttccggaagacgttgactttgtggccggagctatgtccccgctgcagaccagcgatgggtttgttcactgcaagtgcccgcactgcggaaaggacgctctccgtgaaaccgataccatggatacattcattgattcttcctggtatttcctccgctattgcgacccgcataatgcagacgaaccattcaacagagaaaaggcagactactggatgccggttgatcagtatatcggtggtattgaacatgccattctgcatctgctctattcccgtttctttgtcaaggttcttcatgatgaaggccttgtatctgcagatgaaccgtttaccaacctgctctgccagggcatggtgctgaaagacggcggaaagatgagtaagtcagtaggcaatgtagtcagcccggaagaaatcgttaacaagtatggcgcggatacagcccgcctcttcatcctctttgccgctccgccggaaagagatctgaactggagcgatcagggcgtagaaggttcttaccgtttcctgaagcgtgtatgggctattacagaaaagtatctggaattaaagggcgctgacggcgacagcctgacagcggatgaaaccgcattgagacgtcgtctccatcagaccattgccaaggtaacggaggatctggatggcaagtttaatttcaacaccgccatcagctctattatggaactggttaatgccatgtacctgttcattgaatcccacggggaaatcaatacagcactgaagcatgaactgctccgcagcctgctcatcctcctggctccatttgttccgcatattacggaagaactctggcagaagctggatgaaccggaagccagcgttcacgaagcggaatgggttaaggccgatccggcagctctggtagttgatgaagtagaactgggcgttcaggtcaacggccgtgtacgtgccgttgtatctgttccggtatccatggacagagaagcaattgctgaaaaggcaaaagctcttccggaaattaagaagtttacggaaggcaagaagattgtcaaggttatcgttgtaccgaagagaatcgttaacattgtagtaaaataa

SEQ ID NO: 2761 - DNA, 3981 bp, unclassified Dialister
atgaaaatcggcatcgcctccccggagaagattctggaatggtcccacggtgaagtaacaaaaccggaaaccattaactacagaaccctcaaagcggagacggatggtcttttctgtgaaaagattttcggaccgaccaaagactgggaatgcaaatgcggcaaatataagaaaatgcgttacagaggcaccgtctgcgacaagtgcggcgtcgaagtaaccagctccaaagtacgtcgtgaacgtatggggcatattaagctggcatgcccggtatcccatatctggtacttcaagggaactccatcccgtatcggactgatcctcgatatttctccacgccagctggaacgtgtactctactttgcagcgtacatcgtactggatccaggcgaaaccaagctggtaaaacagcaggttatgaatgaacaggaatatcagcaggcggttcaggaatacggtgaaggttccttcaaggcaggcatgggggcagaagccatcaagaccctgctggaagaactggatcttcacaagatggaagcggcacttaaggaagacatcgctaccggaagcggtcagcgtaaggttcgcagcatccgtcgtctggaagaagtagaagcgttcattcagtccaagaacagaccggaatggatgattctcaccgtactgccggttattccgccggaactgcgtccaatggttcagctcgatggcggccgtttcgctacctccgacctgaacgatctctatcgccgtgttatcaacagaaataaccgtctgaagagacttctcgaactgggcgctccggaaatcatcgtaagaaacgaaaagcgtatgctccaggaagctgtggatgccgttatcgataacggccgccgcggaagagcggtatccggaccgggcaaccgcccgctcaagtccctctccgacatgctgaaaggtaagcagggccgtttccgtcagaaccttctcggtaagcgtgtagactactccggacgttccgtaattgtagtcggaccagaactgaagatgtaccagtgcggcctgccaaaggaaatggctatcgaactcttcaaaccgttcatcatgcatgaactgatttccagaggcatggcttccaacctcaaggtggcacgcaagaaggtagataagctggctccggaagtatgggatgtcctcgctgatgtaatcaaggaacatccggtactcctgaaccgtgcacctaccctgcatcgtctggggattcaggcatttgaaccagtactgtgggaaggccgcgcaatcaagctgcacccgctggtatgcccaggctacaacgccgacttcgatggtgaccagatggcatgccatctgccgctgtccgtagaagcacaggccgaagccagaacccttatgctctccatcaacaacattctgtccaccaaggacggcaagccggtagctattccgtctcaggaaatgattctgggcgcttactaccttaccattgttgaacagagcaaggcagaagaagacaccatggatgtgtcccagcttcactgctacaccggctatgacgaagttatgctggcttataccctgaagaagcttaagatccatgacttcatcaaggtagatatcccaggccatggcctcgttgtgactaccccaggtcgtctgattttcaactttgtcctccaggaaccaatgcgcttctactacaagcgtccggatggacaggaagcactgggtatcaccatcggcaagaagcagatgggcaagctcgtcaacgataccttcaagaaactgggctttacagaaaccgcaaaactgctggataacgtaaaggcactgggcttccatttcgcactcgtatccggtatttccatcggtatcaacgacgttgctgtaccgccggaaaaggataaaattctggcagaagctgataagcaggtagcccgtgttaaggcatacttcagacgcggctttattaccgataatgaaagatacagaaaggttgttgaaatctggtccaaggctactgacgacgtaggcgcagccatgaagggcagcatgcgtaagttcaacccgctgaccatgatggcacagtccggtgcccgtggtaacgacaaccagattcgtcagctggctggtatgcgtggtctgattgccgatacatccggtaagaccgtagaaatgccagttaaggctaacttccgtgaaggcctgaccgtactggattacttcacatcctcccacggtgcccgtaagggtctggcagataccgcgctgcgtaccgccgactccggttatctgacccgccgtctggtcgatgtatctcaggatgtcatcatccgtgaagatgactgcgacgttcaggttctggacttcgaaagggaaaaggcaatcattgcttccgaagaagataccagaaaggctattatgaacctcaagccggaacttctcggtaccattctggatcaggacgtagtagatgtacgttccggcgatatcctcatcgtcaagggcaaggtacttgatgcatccgatatcaccacgctgaaccgtcatctcgttccgtccatcaccgttattccgaaggcggaagaagaaaacctcgaaacccgtgaaccggtaagctacgatctgggtcagcaggctggatatgaagaatacaagaaggccattacccatcgtatgcatacccacttcatcggcaagaagttcgaaaaggacgttcttaccctggatggagatgttctcttcccggcaggaaccgtcattactgatgaaatcgctgacagagttatcaatagcaacgttccggttatctatgtccgtatggatgaagccgaaggcgttgaactctccaagattgtggaatccggcggacttatcgaatccctggcagaccgtatcagcggccgctgcccagtagaagatattgtcaatccggaaaccggcaaggttattgcagttaagaacgaagaaatttccgatgaccaggccgaagaaattgaaaagtactacgataccgtcaaggttcgttccattcttacctgtcactccgctcatggcgtctgcgctaagtgctacggccgcaacctggcaacaggccgcgacgtagaaatcggcgaagccgtaggtatcattgcggcacagtccatcggcgaaccaggtacacagctgaccatgcgtacattccataccggcggcgttgcttcctccgaagatattacacagggtcttccacgtgtagaagaattgttcgaagcccgtaagccaaagggaaatgctatcatttccgatttggccggtacagtacatatcgaagaatctgaagaaaacaagggcgtattcgttatcaccgtagctaacgaagaaacctctgaatcctacaagattccattcggcaagcgcatttccgtagtagaaggacagaagattgcggcaggtacccgcctcatcgaaggtaatatcaacccgcatgacatcctccgcgtaagcggcgttcaggctacccagaactacatcgttaaggaagtacagaaggtataccgttcccagggtgtagaaatcaatgataagcacattgaaatcatcgttcatcagatgctgcgcaagattaagattcacgatccgggtgattccaagtggctcccgggcgaaaccgtggatatcgttgcgttccgcgctgaaaacgaacgtctggatgacgaaggcaagagactcgcaaccggcgaacacctcctcctcggcaccaccaaggccgctctggccaccgattccttcctctctgcagcttccttccaggaaaccaccagagtcctcaccgatgcagctatcaagggcaagactgatccgctcattggtctcaaggaaaacgttatcatcggcaagctgattcctgcaggtaccggtatttcccgttaccgcaagatgaaagtcgttcatctggcagaagaagcaaaagctgaagaagcagaagctgaagctgaataa

SEQ ID NO: 2762 - DNA, 4353 bp, unclassified Dialister
ttggggattttgagtgccatacttgtagtactggcactgctgaccggtgtactggctcattattatgcagttcctgcaattagtgaggcggtggcatcgacagcaaagaaaaaaattaatggacagcttacatggcagtctatggaattgacccctggccttgatatccgaattaatgagctggatgtaaaggataaaaagggtagggatgtcttaaagtcgcctcaattaacagtcaactggtctgtgtgtgctttaatgcgctctttttttgatgacagagataccctggctgccattaccagcattgtggctgacaaaccggcagttcaggtatataaagatggagaacagggctggaatgtctctcatctgattattgtggataacagtacaccggcttccagattttatggccgggtcctcattcatgacggaagtgtgcttgctgtaccggcagccggttcagccgtacatgtttcttccctgaatggccagctgcgctgggatgatgcgcagattatccacggagcctttaccggacaggtggaaaaggcgctgacccgtatggatttcaattataaggattccagtcactatgatggagaagtgacagcggatggtcttccactgactttgatttatcagctgggcatatcctatccggaatccatgaacgatcttcacatagaacagggaaagctttttgtacagaaaggccatctctggaacagaaatggaaccatttcccttcatgcttccgcacagattaatgatgcaggcgggcggtataagagttatcgtttctccggcggctatgcggactttgatgtattcaacggtcacgcgggaatccatacgctgtcaatgcgggttaacggacaggccattaagggcagactttccgcagactggggaaaatcaatatctgtagatggcagtttccgtggacaggatatagacctggcagcactccttccaggtcagtctgccagcggcagggtaaatgggactgtacacgtatatggatccatagataaactgtctgccagcggccgagtttccggctcagacatcagtgttcagggagtacatctgaaaaaagggcagggagctttcttatgggatggagagaaactgactctttctgatttccatggtcagcttggaaatggctctctggatgggacaggaagctatgctatgcatagcggaaaattctcagtcaatgtcattgcccataatgcggatataggaaccctggcacgctcttatggtgtcagtggtatactgtccggacagattcaggcagaaggtacactttccggaggtactcctcacctggattctgcatatggccgctttagcgctacacagattaaagggcatggggcttccgccggagccgtgaccggatcggttactttattcggaaataatcttaatgcagtgataaatgccagccgatttacctatcagggaatgcaggcagacaggatatcagctaatgtgaccaaggttggaaatatatggaatgttatttctgcagatggtctttccggacagggggcattccatatttccggaatggcatctgaccgccagatgaatcttctggtggatgcggaacgcatatcgttaaagggagtatcccatgtggccggggtagctatgtccggggtggcatctctccatggccgggttaccggtaccatgaaatctccggtatatcagggcagcatatatgcgtctgatggatccataaagggtatagagtttactgatatatccggcagtctgacactggaccggaacggtgcgcgtatagacaatctgcgctggaatacccgtgaagggagtcatgaaatttccggtatgctgggattcaacgctcagtctccattaaatctgaaggttaagtcccagaatatccgggcagaacaggttctgctattggcagggatgtcctatccgattaccggatacgtaaacaacaatatgaccattacgggaacattgaagaatcctgtggttacaggggaaattctggcctggaatggctcggttatgggtcagctgtatcagagcattggcgccgattattcctttaaagatggggtactcagcatatccaatggcctgggaaacgcttatggaggaacggcctcagttcaggggacagcttcagaaaaggccattgacatgcatgtggaactggtagatgtcgatgctggtcgtattctgttaaacaatcaagtggatggtaagattactcttcgtgggcaggtcactggcagtctcagtaatcccatatttggcggacatgtggaaagccggtctatccgcataggggaagcttatatgggactggttaatgcggatattgactatgcaaatcatgtcatttctgttactaatggcatgtttaaacagggaagcggtgattttacctggaaaggcagtatcaatttgaccaatatgggcatagacggtcacttgcagtttactgactgggatatggcagaggcggccaaaatacttcaggttcctgttcagaacgtatcagggattatgagtggtgctatgaatattaccggctctatagaacatccaaatggagatattgccgccactatcagtaaagggaatctgggaaatcagccgattgcggatggaaagatagatctgtcctatagaaatggagcgttgactattcgtcagttacgcatacctgtagggacgggacttctggctgctgagggggctactacgcctcaggggggcctggatattcaaatggcagcaaaggatatgaatctgtcctgggtaccacaggttctggggcggaaagatgttcagctggatggcagcctgacggcagggataaaactgtcaggaacaaaggataaacccaatgcggaaatttccattggtgttgataatccttcctataacggcactggatttgattccatgtcagttatggggctgattacccaggggaaggtatttatccagcatggtctggttgtaaagggcccctataaggccactatgtacggtaccatgccaattaatgcattcaccagggtaaatacggcagatgcggctcccatgaatctggatattaatctggataatgcagatcttaacattctggctatgcttaccaatgcggttacctcagcggaaggacccataaagggacatgttaaggtaaccgggccctggactgatcctgagcttaacgggggtattgccatctccgatggttccctgatgatagaaagcatgaaggaagccgttaccggtatttcagggcagattcagctaaatggcaaatcagcagatttgaatctgcagtcggtccttgggggcggcacggcagcgattaccgggaaaacaagctgggataagggtagcctgaccagctatgaaggaaccgttcaggtgcatgcacctgccattcagtctacctattataatggggcactggataccgatctgactattgctgagatgtttggcaaaccgggaattaaaggaactgtatcgattcatgacgccacagtggatattccattatcctttgaatccggtgatggttcattgcctgtaaataccaatctggatatacagattggagacaatgtgaagctctataacagtatgctttatgatctggcaatcaaaggaaatattaagattataggaccgctgtctgcaccgatatcatctggacgcgtcaatgtactgaatggtacgatccattatctttccaatgaatttaatgtgactgatggatacgctatctggggcggagtgcctgattccatcctgccagtgataaatctggcggcggaaaccaaggtgggccattacactgtagatatgaagctttccggacctccaggggctttccgatttgaactgaacagtgagccagcattgaatgattctcagattgttacattgcttacggtacattctgatccatccagtccggataatgatgcagtacagggggcgctgtttaatgcaggactgcagatggtatttaacagcggggtacaggattacctcaaacagaccataggattggattatatcagtgtgacctccagcctgaatgaagggtatgaaagtgatttaaagcagaatgacagctattactatataaagattggtaaatatctgtttaatgattttatgcttacggttactacaggaattaataacgagcagaacagtcttggtttttactataatctgaaaaaccgcctgggggtttccgcgtggtataatagtgaacatgataagtatgtaggagcggactggagctttaatttctag

SEQ ID NO: 2763 - DNA, 2463 bp, unclassified Dialister
atgtttaaatttatcgaaagactgttcaatggttccaatgaacgtgaaattaaaaagatgaggcgggtagttgaggaacagattaatccgctggaagcctccctgaaaaatctgagtgatgcttcattgacgcataagacggtagaatttaaaaaccgtctggctaatggagaaacactggatgatatcctgccggaggcttttgctgttgtaagggaagcttcccgccgtgttctcggtatgcgtcagtatgatgtacagcttatcgggggtatggttcttcacagtggcaacattgccgaaatgtgtactggtgaaggtaagacgctggtcgctgtagcacctgtttatctgaatgcgctggaaggcaagggcgctcatgtcattactgtcaatgattacctggcaaaacgagacagcgagtggatgggacaggtttataagttccttggactctctgtaggtctgattgttcatgatctggatttcaatcagagaaagattgcctataattctgatgttacctatggtaccaataacgaatttggttttgactatctccgtgataacatggttacccgtctggatcagatggtacagcgcccgcttcattattgcttaatcgatgaagtggacagcattcttattgatgaagctcgtacaccattgattatttccggcccggggcagaagtccactgatatgtactatacagtggctaaactggttccaaagcttgaaaaagacgtggactataccattgatgagaaacagaagactgtggctccgacagaggctggtgttgccaagatggaaaaactgcttcatgtggacaatctatatgacaccaaaaatctggagctgaaccacattttcaaccaggcacttcgcgcagaaacgatgatgaagagagaccgtgactatgtggtcaaggatggcgaagtcatcattgttgatgaatttaccggccgtatgatgtatggtcgccgctactccgatgggcttcatcaggcgattgaagctaaggaaggatgcaaggtggaaagagaaagccagacactggcaaccattactttccagaattatttccgtatgtatgacaagctggctggtatgacaggtacggctaagacggaagagcaggaattcattaagatttatgggcttgaagttttccagattccaacaaacaaaccgattcgccgcgtagatttgccagatgcaatttataagaccaaacgtggcaagatcagagccgttgtacgtgaagtaaagagacgtcatgccacaggacagccgattcttattggtactacatccattgaacagtcagaagaattgagccattaccttaagaaggaaggcatcgttcataatgtgctcaatgccaagtatcatgaaaaggaagctatgattgtcgcacaggcaggtcagaaggggcaggtcaccattgctaccaacatggctggccgaggaaccgatattgtccttggcgatggtgtggcagaacttggcggtctggccatcatcggtacagaacgtcatgagagccgccgtatcgataatcagctgagaggccgtgccggccgtcagggcgacccgggcagcagccagttcttcctgtctcttgatgatgacctgcttcgcattttcggcggggacaacatcaagaagttcatggaaaagatgggtcttgacgaagatgaggaaatcaagagcaagatggtatccaatgccattcgcaaggcacagcagcgtgtagaaaaccgtaactttgaaacccgtaagtacgttctggaatacgatgatgtcatgaaccagcagcgtcaggttctgtatgaacagcgccgccgtatcctggaaggggaagacatgaaggatcagattattcgtatggtagatgaactgattaatcatgccatgaatacctacgcggacgaaaagttgtatccggaagaatgggatctggcaggacttatcaaatactgtgaaaagtatttcctggttccaggtgagatcacggtggaacagattgaggatatgagccgcgaagaaatacagaagcttctcgttaagacagctcatgacacctatgaatccagagaaaaatccattggctcggaactgatgagagagctggaaaaggcggttatgctcaaggttgttgacgctaagtggatggaacatctggacaatatggatatgcttaaggaaggaatcaatctccgctcctatggtcagcgtaatccgattgttgaatacaaggtggaagcctttgatatgtttgaagaaatggaacatatcattatggaaaccattattctctatatgtaccatattcagatccgcgtaacagaaccagtacaggcaccggctacagaagaccacctgaagggttctacggctcattatgtggatgacaacaccaatgaatccgtagcggaaaacaatattgatcattaa

SEQ ID NO: 2764 - DNA, 2622 bp, unclassified Dialister
atggatattctgaatgatgcacagcggatggtggcagaggacgggacacatcatattctgcttaccgcaccggcaggaacaggaaaaaccgggactctggctagacgtatagccaggctggtggagaagggaatggccgctccggaggaaattctctgccttacattcaccaataaggcatgcagggaaatggagcatcggatacaggaatatatgggagaaaaaggccagggggtttctgtaaagaccatacatggtttctgttatgagcttatccaggctgaggcggacaatccggaaaaccggtatgtgaacctgtcggtatgggatgaagaggattgccgggaactgatggacgatatactggaaaaatggaatacccggccgggaaatgaacggcagatgatacggaacagccgatactttttctatgatgtggataaggcgaaaaggtggctgctggaaaggaaccggtataccggagaggctgcggattatcttgcggccatgaatgccatatcgccgaacccgtttaacgtggacaaaaacagggccagggcggagatggccgccagctatgatagacagctccattccctgggcggtatggactttaatgacatacttatcggggcattgcatctgctgtcggatgacgggtgcaggcgccggtggtcatcccggttccgctatctccatgtggatgaaatgcaggatatgagtatgctggaatatggcattgttctccatctggcgtcgcaagccagggtacttctggccggagattattttcagactatttatgaatggcgcggttcggatccgattcagctgattcagcggttcacccgtgaatttcatccggaagtatatacctttactgaaaattacagggcgacccctcttctgctgaaagcggcggaaggctatctgcggaatgcctttagtaaggacataccggatgaacggtcatccgtttcttctgtaagagaagggacgggagagccgatagtcattcatccggcctttgaaacgctggacggagaggccagatggattatccagtgcattgaatttcttgtacataaacagaagaaactgcaggaggcggagcagggaaaaatatgcatcctgtgccgtaataatgcatataacgaacggctggaggaggctttcacccggcagctgaatcagctgaaggccgatgggagcgggcgatgggactttatacggtttctgcgcataggggaagaaaaactgtacaggaaaagggaagttaaggatgtactggcggcactgcatctggcagtgaatccctttgataataacagcgcaaggcgtctctgccttaactggggaaaaggtatcggggaagccacggtaaaaaagattctgtcatcagattaccggaagctggggattgctctcagtgattttctgcgtccggatgtactgcgttatgcggatacttatggaacactgcttcaggcactggatgaaggccggctgaccgtatttgatgtggagtctacagggacaagcacgtcaacggatgagattgtgcagctggcagcggttacgctgaaccgggacggacaggtaacggcccggtttaaccggctggtgaaaccgtcaggcccggtaggagaatcagaaaaaatacatcatatatctgatgagcggctgaaagcggagggagaacctccggaaaaggtattcgctgatttttttgcgtttaccaggaatcatattctggcaggacataatgtctcttatgacatccatatcctgatgagtcagatgaggcggctggggatggatccggtggaaactccggcctgggtggatacactggagattttcaggagatattatccggagttgaaaaatcataagctggaatatctgggagaggtatttaaagttcaccataagtcatctcacaacgcatatgatgatattttggctacggcagaaatccttatgtatgcggtgaatcatcatctgcggccggaaagggatgcgcgccgggcatgcataagtccttatgtttccttatttatgcccatggcccggattgtgcaggatatatccagaatgtcctggaaacagaatccgaatgcacttatcgggcaggtcatttcacagctcaatatggatgaatattttacacagcatggaaaaacgcgggaacggcagcatctggaagagctgaagaggtgcgcggaagcatatcctgattatggaaggccgccgcaggatgtgctgcaggaatatctggctatgacggctctggatgctggagatgaaatcttatggcagtcaggacaggccggtataccgattgctaccgtgcatcaggccaaggggatggagtttgattttgtctttatggcgggaatggctgatgaaaattttccttcctttggtgcattaaaggcaggaatgctgatggaagaaaagagattgttctatgtagcaattaccagggcaaggaagagactattcatcagctggaacatacagtcatcccggttcggagatgccggtgcgtcccggttcatagcgaatcttccgaaggataccgtaattgtgctacaggcaccgcagggaagaacttaa

SEQ ID NO: 2765 - DNA, 2643 bp, unclassified Dialister
atgaaaccggtgaaactgactatgagtgcgtttggaccatatgcccataaacaggttctggactttacctgtctggggaaccacactctgtttcttatctgcggccctaccggagccggtaaatccacgattctggatgctatgtgctatgccctgtacgggcggaccagcggggatgtgcgcactggggaaaacatgcgctcatcgtatgccggtctggaagaggaaacttttgtggaattcgattttgcgctgggcggaaagtactaccgggtgcacaggagtcctgcccagctggcgcggcgcaaacgcggaccgtcggataaaccggtggaaaaagcaggaaaagcggtcttctcggaaattgatgacaagggaaatgtagtgcgccagattgcctcgaaaggagtggagcagcgggttgaagagttaatcggtataggtgtggaacagttccggcagattatccttcttccgcagggggatttccgaaggctgctccttgcggattccacagagcgtcaggatatcatgcaggaactctttgggactatgcgctatggactgattgaaaaccggctgagggaagaagtatctcagctgaagggacaggcagaacaggcgcacagtcaggtacagacacttctggcttcccggcatgcggaaaacagagagcagttgcagctcatgatggatgaggcaggaaagaaaataaagcagctggaggaagaacagaagaaaaaagaacgggaaaatgaggaattcatccgtcactataatgaggcatcccgtctggcggaatccttctcccgtcttgaacaggcagtgaaacgtgcacaggaactgaataagcaggaaggggagatggcccaaaagcggtcggatctgaagaagatagatgctgccattgcgctaaacggggaccgggaagccctggttactctgtacatgaaccggaagacaaaggaaaatgacctggccagggcggaaaaagaacagaaggaagccagagacggctgggaaaacgcggaaaagcagtttgaacagctggaacgggaacgcccgcagcaacaggcacggattaaccgtctggctgccctggaggcattaaagccggatgtggattcctttatttccgccagtcagtcctatgagaaggtatccggtcagctgacgaatctggaaaagacactgaaagagaggaccgatacgcaggaggaagtggaaaagaccgcggtcaaagcccgcaaggtggaacatgccctgacagaaagctttatccggggacaggcgtctttcctggcggaagggctgcaggatgggatgccctgtcctgtatgcggttccctgcatcatccggaaccggccatatccgcggaaaaccaggtgacccgggaggatgtggacaaagccaggacagcagcggaacaggcggagaagacagcaggtgatgggcggaaacatcttcaggaatttaaggaaaaggagtacatgcctcttcgcgacaaggccaataaggcgaagaaccttctggaagaactgggacgcaaggtagataaaacctaccggacaccaggggtattgaatctggaaatcgggaaactgagtaaagccataaccgattttgataaccggagcagggcagcggatactgccagacaggaacagaaaatccagctggaaaaacagaataccaccgtgttggaaatcaggaaaaatctggaaagcctcagccgggattatcagcaggggcttcagacctttaccgagaaggttacggcacaggggttccagagtctggaagaacaaaaacggtatcatgaccgcattggggaaaaggacagtctgacacaggaactggagtcctacggtgcggaccggaaaatgcaggcggaaacggaaaataaagaaaagacgtttatagggggccgcagcaagccggatatggaacagtggaacagccagaaccggaagattacagaagaaatcaaggccctggccagccagaaggggacactggaagaacaggaaaaggcgcagaaagaagcggcagcacagattgatgcgctcaccgcttccggcgcggagctggacaggacatatcgcgtggtgggaggcctctatgatgtcataaggggacaggaaacaggaattaatctggagcgctttgtattgggggcccttctggatgatgtgacaagaaaagccaacatccgcctgtctgttatgagcggcggacgttatcagctgcagcgcgccttaggggaacgggccgatgccagaaagaaggcaggcctggatctggaagttatggacagctacaccggaaaagctcggccggcctctacactttccggcggcgaaacattcctggcttccctctccctggcactgggactggctgatgtggtacaggaatatgcaggcggtgtccgtctggattccatgttcatcgatgaaggatttggcagcctggatcaggaaaccctggatctggcactgaagacactggccggactgcagggacagaaccggcttataggtattatttcccacgtgtcagaactggaagaacgaattaccacccgccttcgtgtaaatcgcacgaaaaagggaagcgtggctgtatttgaggtggaatag

SEQ ID NO: 2766 - DNA, 1974 bp, unclassified Dialister
atgaggaaacaaattcagcgcagtctttttttcatgggactggttgctgtgctggtgtcatttctgatgtcggctgtactttattatcagggaatgcagcagcaacggattcacgagctggagatgactacctatgcggcatcccgcgcattgagtgaaaaaaataaggaatacagtatttcctatttaaagcagctatacaaggaaaataatatatcaggcatacatattgtctggcttaataaggatgggcaggtgctttatgattcagcaggtcccctggatgaagattatattgcacagtcggaagtaaagaccggtatggaagagggaagcagtttttccattcataagagcgtcaacggtatacccaaggagtattatacccataaggcaccggatggtacgctgcttcgtctgtccagtgtcagaagtctgaatctcagcatgttcaatggatatattcccgggatgattctgttcatcattgtgttcagtgttggggctgtcctggtagcaaacaagaagacggaagaaatcttaagcccgctgggggatatgagtgtagttatcagccggattatgtccggtgaaaagcatgtagagattcccgggcagtatatagaactgaaaccggtgctcgatacagtaaaggaactgcatcgtcagaccgatgcctatctggaaaatctggaagaagacaggaaaatgatgcaggcggtacaggattctatttctaatggcctcattgtactcaattcacagaaggaaatacttgattataacgtgaaggcagccagaatattccatattgaaggaaatcgcagataccgtaagatttctgtgattttccatgatgaagactggcttcgtgctataagccgtgcttatcacaatacgaagagtcaggaatacaccatgactctgtatgatacaccgtatatggtattgatgacccctttgcggttatttgacaatgaaaacggcctgcttattgtgctgagagacctgtcagctcagtatgcggcagaaaagatgcgaagggaattttctgccaatgtatcccacgaactgaagacccctcttacgtcaatcagtggattcggagaaatgattgccaatggtatgtatgccaatgaggcggatgtaaggatgttcgggcagcggatttatagcgaagcacagcgcatggtgacactcataaacaccattctccatctgtcaaaactggaagaaaacgataccaccattacctggggcatggtgaatatggaagaggttgtcaagtatgtggtagacatcatttctccacaggcacatcaccggggtgtgacggttctctcggaaacagaacctgtatatgtgcatggtaaccattccctgctctctgaactcttggttaacctgctggataacgcggtgaagtataaccggcagaatggacaggtatcggtgaagttgtctaagacagcggataaccatatggttattaccgtatccgatacgggcattggaattccgaaagacaagcagaatcgtgtttttgaacgcttttaccgggtggaatccagccggagcaaggaaaccggaggtaccgggctcggattggctatgtgtaagcatattatctccagacatcatggcacggtcacccttgacagcgtagaaggccggggaaccaccattacggtaaccatgccatgcctatcagctcaggaagtatccattgaggaaggcaatgcaaaggctgctcatgaagaagcggaacaggctaagaaactggctctggaagaagaacgtaaaaaacaggaagagcggataaaagaaaaacaggaagcactggccaagaaaaagcaggaatacagtgaatctgctcatgaaaagaagggcaaactgaaaaaatcaaaatcgaagaaagcggaaaaaggggaggagacaaggaaaaagaaaggcaaaaagaagaaaaaagactaa

SEQ ID NO: 2767 - DNA, 2325 bp, unclassified Dialister
atgacagatttgataaataaagaagggctgaagttgcctttagttgccctgcgggatatggtggtttttccgcgggtttcaaccagccttgatgtaggccgcaaagaatccgtggccgctgtgcgtagcgcggcagggaacgaccgttacctgattatgctgatgcagaagacaccggaagtggaaatgccgctgccggaagatctttacaccataggcacggtagctaagattgaacagatgcttcagcttcctggcggtattatccgtatcctggtgaaaggggtatcccgtgtccgtgtcagcgatatagaacgcaacacaggacatctcacaggaactgctgttgatatagaggaaactcatgaaaatccgatggaagaagaagcgtatcgcagaaatatcatgcatcggttcttcgattttcttcatgagaccaaacagggactgccggataaggcaataacagaaatcagaaacattaccaacccgggacatcttgcggatttcgtagcttcccagatgcagatgcctgccgataagaagcagaaaatcctcgaagacactgatgtaacggacagaatcaaacaggttttccagctgctgaatgaggaaattgaaatcggggagattgaaacccgtatcaatgcgcaggttcgcagccatatggaaaaggaacagcgtgactatttcctgcgtcagaagattaagagcattcatgaccagctgggcgataatatctccgaagaagaagaagcggaagaatatcgtcagaagctggaaaagagcggtattccaaaagaatacaaggcaaagctcagaaaagagatcgcccgtctggaaactatgccgcctatgatggcggaatcagccatcatccgcaattatctggactgggtatttgatattccatggacagaagaaagcaaggacaatctggatctggaaaagacaaagcagatgcttgacgaagaccattacggactggaaaagattaaggaaagaattctggaatatctctccgtacgtatcttgtcccctgaatccaagggtcctatcttatgctttgtaggacctcctggtgtgggcaagaccagtctggcacagtccattgcccgcgcgctgggaagaaatttcgcaagaatttcccttggcggcgtgcacgatgaagcagaaatccgcggacacagacgtacatacattggagccatgcctggacgtttcatcgaagcgatgcagcaggcaaagacgattaacccgcttcttcttctcgatgaaatcgataaggtaggcaatgatttccggggcgatccggcatcggcgcttctggaagcactggatccggaacagaataaggaattccacgataactatattgatattccttacaatctgtccaaggtattctttatcgccacagccaatacactgtccactattccggccgctcttctggacagaatggaagttatcagcctttccggatatacagaaggagaaaagctggaaattgccaagaaatatcttgttccaagacagagaaagcagaatggcctgaaggcaagtcagattaaattcagcgacaccctgcttcgtaagataatccggaactatacccgggaagccggtgtccgtgaactggaacgaaccattggctccctgtgcagaaaagtcgctaagaaagtagtaatgcatgatgaatccatgcctgaactttccgcgcgcacttatgagaagtatctgggaccggttaagtatatgccgatggcagaagaacatccttctgcagtgggccgtgtcaacggactggcatggactgcggcaggcggtgaagtactggatacggaagccgtagccattccggggaagggtcgtctgattcttaccggacgtctgggcgatgtaatgaaggaatcggcaaccgccgcatatacttatgtgaagagccgtgcctctgatctgaagctgaaagaggatttctgggaaaagctggacctgcatcttcatttcccggaaggcgctgtacctaaggatgggccttctgccggtgtaacgattgccacagctatcgcgtctgccgttacgggacgcaaggtgcgtagtgacaccgctatgaccggggaaatcaacctgctgggagaagtactccctatcggtggtgtgaaggaaaaggtactggctgctgaccagctgggaatcaaacaggttctccttccggaaaagaatcgcaaggatctggaagaagtaccggacgatgtaaagaagagagtgcattttgtattcgttaagaatgcggatgatgtgctgaaacatgcactgatgtaa

SEQ ID NO: 2768 - DNA, 3558 bp, unclassified Dialister
atgaaatctgttctactggttattttttatttgcctgcggaaaaaagcggtaagggacagcgacgggctatgctacaatgtgattacaatatgttaggaggattactctctatggatccattcgttcatcttcatacacatacggaatacagtctgtttgatggtataagccgcataccggatttagtggctcatgtaaaggaaatgggacagaccgccatagcgattaccgaccatggctcaatgtatggcgctgtgtatctgtacaatgaatgcaaaaagcagggaatcaaacccattattggatgtgaaatatatattactcagaacagccgtttccaggtgccgccgggaagagaaaaactgtatcatctgattttgctggcagaaaataatgagggatatcacaatctggtaaaaatctgttccagggcatggacggaaggatttcataataaacccagggctgatcatgacctgctccggaagtatcataaggggctgattgcgttgtctgcctgcgtgggtggagagcttccacaggccattctgtccggcgacatggataaggcccacgaagtaataaagttttatattgatacattcggcagggataattattttattgaactgcagaatcacagactgcctgaagaagccagagtaaggcctgtactggcagacctggcaaaagaatatggacttggactggtggcgaccaatgactttcattatgtgagaaaagaggatgcggccagccaggaaatcaagctgtgtatttctacagggaaaacactggatgatccggaacattttcatttcgccaatgatgaattttactgtaagagcggggaggaaatgagaagtgttcttggcggctatgaaggagccattgagaatactgccagaattgcggaacggtgcaatgttacgttcaccttcggagaacataaattgccggcctttgatgttcctgaaggggaaacagcgaagacttatctgcgcaaactgtgtgaaaaggctattcctgaacgatatggccaacagacacctgaagtaatgaaccggttaaattacgaactgggaatcatagacagaatgggtttctctgattatttccttatcgttatggatttcattcattttgccaaaacgcatggcatccccattggtccgggcagaggcagtgcggcaggaagtattgtttcctatcttcttcacatcacggaactggatcccctggaatttgatctcctgtttgaacgattcctgaatccggaacgtgtgtccatgccggatattgataccgatctgtgttaccggggacgcggccgggttattgattacctggcgcataaatacggggaagatcatgtagcgcagattattaccttttctactctggcagctcgcgcggttattcgggatgttggacgggttatgaatctgccgctgcgggatgtggataaaattgccaagatgattccgcaggggcccggagttactctggaaaagacactggaatcatcccatgagtttaaatcggcatatgaaaccaatcccacggtgcatacgctgattgatcactgcctgaagctggaaggcctttcccgccaggcaggaacgcacgcggccggcgtagtgatctgctcagcccctgttgatgatttcgttccgattcagctgacccaggaaaatttcatacagacacagtatgaaaaagatcaggtggaaaaactgggactgctgaagatggatctcctggggttgcgaaatcttactgtcattcaggatacggtggacatgattaaggaaaacaggaatatagatctggatgtacgtaagattccgtataaggataaagcaaccagtgaaatgctctgccagggggataccattggcgtattccagtcagaatcgtccggatacaccaacttgctgatgcagctggcaccagatgccttccaggatctgatccctatggtggcactgtatcgcccgggaccgcttggcagcggcatggctgaagattttataaaaagaaaacatgggaagattcctgtagaatatcctcatcctatgctggagcctgtactgaaggaaacctatggggttatcctttatcaggaacaggttatgagaatcgcgtctgttatgggcgggttcagtcttggacaggcggaccttcttcgccgtgccatggggcataaagagtcggatgtgctgctggcacagcggcaggcattcctggaaggcgcggaaaaacagggagtaagcagcgaagtggccaaccatgtgtttgacctgatggttcattttgcaggatatggatttaataagtctcattccgtatgttacgcatggatagcctggcagaccgcctatctgaaagcccatttccgtccggaatttatggcggcgatgatgacgtgctataacggagaccggggcaaggtgagccgctatatcgctaacagcagaaaacatggggttaagctggtggcgcccaatgttaatcgaagccgggcaagttttgccgccagcggaaataccatactgtttggactttccggtattcagcatctgggggatgctgcggtagagtcgattatcgaagcgagagaaaaagatgggccgttcacctcactgtccgattttcttgaacgtgtggatgggcgtacagtcaatgccagagcctgtgaaagtctgattaaatgcggtgcgctggatgacctgggagccaaccggccacagatgctggaggcacttcctcaggctatgagcaatgcggctatggtaagggaagatcgacagtcagggcagatcagcctctttggtcagagcgaaccggtgcatgaagtggcttataaaccgctgccggatgcttcagccagagagaaaatcgactgggagcgacagctgctgggattctacgtatccgggcatccgctggatcgattcaaaaatgaaatgaagcagtgcgtacctctgtctgaactggagggggaaggacgggttacactggatggaaaactaattacggtaggcggaatcatcaaccatgttaaaggcatggtgacaaagaaaggcgcgcctatgggctatatcacactggaagactttaccggggaaatcgaagtggttgtttttccgtcagcttgggaaaagtacagggaattgctgagaaatgatgcggccatactcctttccggacgtgtgcaggctaatgaacgaaccgtgcatattctggcagaacggattgcgctgcttgacgatgtgaaacagaggaaggaagatcagatagcccagagggggcatatccgggcactgcatctgtacctggatgaatggcacgaatccgctgaggtaagccgtcagctggcagttattcttaaacgtcatcatggacagattccggttttcctccatatggagagaacacgtaaaaagataaccatgaatgagcaatttgccaatgatggatccgttgcgtcagaaaacgcgcttaaacttctgcttggcaatggggctgtggaatatgataaggaaaatgactga

SEQ ID NO: 2769 - DNA, 2928 bp, unclassified Dialister
atgaaatggaatataaatgacgtggtccatgggttcaaggtgaaacgcatggaacgtgtacaggaagtagcgtctgatgtgtacgaactggaacacgtacagtccggcgccagattgctttatctggacagcaaggatgacaataaggtgttctacatctgcttcagaacgacaccggacaactcaaaggggacaccgcatattatggaacattccaccctgtgcggctccagaaagttcccgctgaaggaaccatttgttgaattggtaaaggggtctctcaataccttcctgaatgctattacctggccggataagaccatgtatccggtggccagtcgcaatgatcaggattttcataaccttatggatgtctatcttgacgccgtattttatccaaactgcctgaagaatccgcagattctcatgcaggaaggctggcattatgaaatggctgatgaaaacagcccgatcacctataatggtgtagtatacaacgaaatgaagggtgccttatcttctccggaagcactcatggaagacaaggctatgagcacattgttcccggatactacctatgcggtagaatcaggtggggatccggaggttatcccagccctttcttttaaggagtttacagaattccacagaaaattctatcatccgtccaacagctttatttatctgtatggcaatatggatattgactccacactgaaattcattaatgatgaatacctctctgcatttacaagacatcctgttaactctgctgtacagacacagcagccatttgcagaacgcaaggaatgtgaaggctctttcggcattacagaaggggaaagcacagataagaaatctatccatgcgctctataccgcatacaacgatcacatgagcacagcggaaatgctggctttccgtattctcaactatacccttattgatatggacggggcaccattgaaaaaagcgctcaccgattccggaatctgcagtgatgtgtccggtcattttgaaaccagtctgaaacagccggtgtggacgattgaagttaccggctctaatccggaagataaggatacatttgtctccgttgtagacggtactatccgtaaactggcactgggcggtctggataaggatatgcttaccgccgcattgaaccgtattgaattcaccctgcgggaaggcgatttccagggacgcccgaaaggactttattatggtgttcatgtaatgcagcagtggaactatgaccgggatccattcacagccctccgttatgaagaagacctgaagacactccgtgaaggcattgaaaaccatctgtttgaaaaccttcttctcaaatatgtggtcaagaatgaacatcaggtgctggtgaccatgaaaccggaaaagggacttacagaaaagaaaaacgcggctacggcacagaagctggatgatttcaagaagagcctgacaaaagaacagattcaggaaattattgaaaatactaaggcattgaaggcaagacaggccagcggcgaaaccgaagaagcactggctaccattccgctcctttcccgctcggatctgaagagagaagtagaagaagtttcccaggaagaagaaaaggtacaggggattacccatctgtcctatcaggaaaacacctctgggattacctatctcaatctgttcttcactctgtatggtctgaaagcagaggatgtaccttatgcgtacctgcttaccaccattctgggttccatggatacagacaatcatacctatcaggaactgacacgcatttccaatacctatactggcggtatgtcctatgccattacgtcctatgacgataaggcggacaacactaagtatgtgccggtatgtgctgtacgcggcaaggcactcacttccaatgcggataagatgatgcagctcatgggagaggtccttaaccatacccgctttaccgacacaggccgtctcagagaaatcctcatggaagaaaaggcatcctgggatatgtctctgttcgacagagggcatgcactggttatgatgcggctgatgtcctattactctccggctgctcagtttaaggaacagggaagcctgtcctactactatttcctcagtgatctgctggaacattttgatgaaaaagcagaacatatcaaagcgcgcctggcagaaaccgcggctaagatttttacaagaaagaatcttattgtccaggaagtagggctgaaggaagaaaaacaggcggttgtcaatcatctggatgcagtcattggggatatgccggaaggagaagcatgtcacactctgtcatttgttttcccggaaaccggaattaatgaaggattcctttcctcgggcaaagtgcagtatgtggcaaagggtggtaactttgtgaagcatggattcaaatttaccggagctctccgggttatggaaaccatcctccgctatgaatacctgtggaagaggatccgagttcttggcggtgcctatggagcctttacacggattgcaactaacggggatgcccttctctgttcctatcgtgatccgaacctctctgaaacactgaaggcttataaagaactgccggaatatctcagacactttaatatttctgaacgggaaatgacgaagtatgtaattggaaccatggctcctgcagaaacacagcttactccatccatgaagggggaaagagctatggttatgcgctttaccgggcaaacccatgatgacagacagaaagtaagagaacagattattgactgcacccaggaagatatccgtgcactggccggcctcatggacagtgtggtatcggataagtacttctgcgtactgggtagtgaagataaactgaaggcggaatccaatctgttcgatcatctccgctctcttactaaatga

SEQ ID NO: 2770 - DNA, 2049 bp, unclassified Dialister
atgaaggatttactgttggaaattggaaccgaggaaatgccggccaatatcatgccttctctggtaagtcagtttaagaccctggcagaacagaaactggcagaagcccgcctttcttttgaaaatataaagatttacgcaacaccgcgcagactgacggcttatgttgccggcgcagcagaaaagcagtcggatgaagttcttgataagagaggcccttctgtgcaggcagcttatgataaggatggcaatccgaccagagcgctgcaggggtttgcccgtggacagcatgtggatgtatcttccgtggaagtgaaggacaattatgtttatgcccatgtggtaaatgaaggtcgtccggctatcgaagtacttccggaagtatttactgctatggtgtccggactgaattatccgaagggaatgcgctggggcaatgaagaattcaagttcctgcgcccgattcgctggattgtcgccctcattggcaatgaagttgtgccaatggaaatcgctcatgtaaagagcagccatgtatcccgcggtcaccgcgtactttctcatggggatgtcataatcaatgaaccgaaggactatgtagaagctatgcgcaaggccttcgttattgtagatattgatgaacgccgtgaaatgattaaaaagcagctgcaggacctggcggacaaactgggaggcaaactctggcacaacgcgggacttcttgaagaaattaatttcatcgtcgaatatccaaccgcactgtatggaaagattgatgaagaattccttaagcttccggtaccggccgtagttacccctatgcgtgatcatcagcgctattatccgctgcacaaagaagatggaagcctgcttccttatttcctgaccgtaagaaacgggggaacaaaggctctcgacaacgtcagagtggggaatgaacgtgttcttcgtgcccgtctggatgacgccaaattcttcttcaacaatgaccgcaagaaatctctggaagaacatcgggccgatttggtacgcatcaattatcaggaaggcatgggcaacatgctggataagtccgaccgcctgatgaagctgtccggcgctctggcagaagactggggatttaccgatgaggaaaaggcagatacccggagagccgctttcctgtccaaggcggatctgtccactgaactggtaaaggaatttaccgaacttcagggggaaatgggaagagagtatgctatgctggatggagagaagcagaccgttgccgatgctatttttgaacagtatatgccgagatttgccggagatatactgcctggaacagccgcaggacgtgccctgtctgtagcggacaagctggacaatctggcagccacattcctgcgcggaatgattccaaccgggtctcaggatccatttgcccttcgccgccagaccattggcgcagtacacatccttaatgcaggaaagattcactgggatatccgccgcggtattgcaggagcgcttgccctgcttcctggaacggaagaacagaagcagacggcagaaaccgctattctcagcttcttccgcgacagaatccgtcagattctgttaagcgacggcattgcctatgatattattgatgcggttctggccggagagcttaccgatatttatgacgcattcctgaaagcgcagagcatgacagaaagcaagctcaaggaaaatacagaacttcgtcaggcggtaaccagactgcacaatattacaaagaatgcagaagaaggaccggtatctgccgacctgttcagagaagacgcagaaaaggccctctgggatgcttatcagaaggtggaaggcaaggtacactccttgtatgcggctcatgattatgcggcagccatgccattactggacacacttacacagccggttaaccactatctggatgacgtcatggttatggacaaggacgagaaagtcagaaataaccgtctggctatgctgaagactgtactggccctctttgatggctggggagatttcagcaaactggtataa

SEQ ID NO: 2771 - DNA, 2439 bp, unclassified Dialister
atggactgggaagaaggaaaaatcatctctgcacctctggaagagcagatgaaaacgtcctacattgactatgccatgtcagttattgtagcccgtgcacttccggatgtgcgagatggtctcaagccggtacacagacgaatcctttatgcgatgcaggaagctggtatgcttccgggcaaaccatataagaagtcggctcgtattgtcggcgatgttcttggtaagtatcatccgcatggtgatatcgccgtatatgaatccgcagtacgtatggcacaggatttttctacccgctatctgctggtagatgggcatggtaactttggctccattgacggagactctccggccgctatgcgttataccgaaatgcgtatgaccaaactggctgtggaaatgctccgggatctggacaaggataccgttgattttatgccaaactatgatggttccctgcaggaaccggtagtactgccatcccgtatcccgaatcttcttgtcaatggttcctatgggattgccgtcggcatggcaaccaatattccgccgcacaatctgggggaagtagtagatggcctgtgcatgatgattgataatccggatgtcaccattgatcagctgatgactaagattaagggaccggatttcccaacagggggccttattcagggccgggacgggattgtcaaagcatacactaagggacgcgggggaattgtggtacgtgccaaaacccatattgaagagatgtcccatggcaaacaccgtattgtagtaacagaaatcccatatcaggtaaacaaggccagagtcattgaaagtattgccgatctgtcccgccagaagatactggatggaattaccggacttcgcgatgaatccgaccgtaccggtatgcgcatttccattgaactgcgtgctgacgtcaatccgcagattatgctgaacaacctgtttaagcatacccagctgcagaccacatttggagccattatgctggctctggtggatggacatccacgggaactgaacctgaaggaaatcctgtattactacctgaaacatcaggaagaagtagtaacccggagaagccagtttgaattgaacaaggctaaggccaaggctcatatcctggaaggcctcctgattgcgctggacaacattgatgcggtaatcagaaccatccgtgaatccaagaccgatgctatcgccaaggtagcattgatggataatttcaagctttccgaaaagcaggctattgccattctggatatgcgtcttcgtcgtcttaccggactggaacgggaaaagattgaagaagaatataaagaaattcaggaacgtattgcctacctggaagacctgctctccagccatgacaagattatgggcgtagtaaaagaagaactgctggaagaaaagaagaaattcggcgatgcccgccgcagtcagatcgtaagggcagcggatgattttgatgtaactgacctggtaccggatgaaccgatggttatcattatgaccagacagaattacatcaagcgtatgtctgttgacacctggcacgcacaggccagaggaggcaagggcgttatcggtatcaagaccaaagaaggggactacgtatggaaggtgcttaacacctctacccatcacaaggttctgttctttaccaataccggcagggtctacatgcgaagcgctatggatattccggaatccagcaaccgtaattccaagggcagtgcattgattaactttattccatccctgactccgggtgaaaaggttacggaactgtatgatattgatgacagtgaagtggataccgctaagtatctgttcatggtcaccaagtttggctatgtaaagaagacctctgtggatgaatacagaaatatccgccagaatggtctgattgccattaaactgcgtgaaaatgactccctggtaaccgtgcttcatgtatcaggcggcgaaaagatattcctggcgaccaagaagggcatgggtatctgcttccctgaagaagaggttcgcgctatgggacgggcaaccggtggtgtacgcggcatagaccttggacgtgatgacgaagttatcggcgcagttatcgcggaaccggaccgtgacattatcaccatttcctcggatggacaggctaagagaaacccggtatcttcctatcgcgctcagagccgtaatggcaagggcacccgtaatttcaaacggggatatgaagtagtagctgtcatcaccgctgtagatgatgatgacctggtgggggtatccgaaaagggcgtaaccatcaaggtaagggtagctgatatttccacgaagaagtccagaggatcccagggcgtaagcattcagaacctggaagaaggcgaccgtgtagcatccatcgacgtaatcccgaaggatgacgaagaataa

SEQ ID NO: 2772 - DNA, 1338 bp, unclassified Dialister
atgaacgtaaaggtagaagcattggaccagcacaaggtcaaggtaacggtggaagtacctgctgctgatgtagttaaaggttacaaacaggcagtttcccgtttcgcaaaccagatcagactgaagggtttccgcaagggcaaggcaccgcgcaaggtactggaaatgtatctgggcaaggaagctattgaaggcgaagctaaggaaatcgtattcaaccgcgcactggaacaggcacttcaggatgaaaagcttgtaccggtaacccagccggaagttaaggatgaatctttctctgaaaaggacggctctacatttacagctacattcgttaagcgtccagaagttaagcttggtgaatacaagaacctggatgcaaagcatgcagaaccagttgtaaccgatgacgacgttatggctcagctcaagcagctggctgaaaacaatgcccgtctggaagtagtagaaggcgctgaactcaaggatggcgacttcgcaattatcgacttcaagggcactgtaaatggcgaagcatttgaaggcggcgaaggcaaggcttatccgctggaaatcggttccggcagcttcattccgggattcgaagatcagctgaagggtcacaaggctggcgatgatgtaacagttaaggttactttcccggctaactacttcgttaaggatctggctggcaaggaagcagaattcgctgtacatgtaaacgatgttaagcagaaggttctgccggaaatcaacgatgaatttgctaagtccatcagcaagcaggacagcctgaaggacctcatggaaaccatgaaggctgaaatgcagggcagagcaactttccaggcaaaccaggcttatcgtcaggcactggtagatctggctgttgctaacgcgcaggttgatattccgcaggaaatgattgatcagcgcctggatgacatgatcgatgaaatccgccagaatattgaagcccagggacattcctttgaacagtacctcaagcagattgataagacagaagaagatctgcgtaaggattatacagaaactgcagaaaagaatgttcgcgaaggtctcgtactcaatgccatcgctgacaaggaagacattcatgcaaccgatcaggatctgagcatggaagtattcaccatggcacagcagttcaatgctgacccgaacgaagtggttaagattatccgtgaacagaaccgtgtaggtatgctcatcgatagcgtaaccagaaagaaggcagcaaacttcctggctgaacaggctaagaaggaagaaaagccggcagctgaaaaggaagaaaaggctgaagctgaaaaggaataa

SEQ ID NO: 2773 - DNA, 2613 bp, unclassified Dialister
atgtttatgaagggtaatgatattagagaggcatatctgtctttttttgaaaacaaaggacatttacgcctggacagtttttcgctgattcctaaggatgatcccagtcttctcctaatcggcgcaggtatggctccgttgaagccgtattttaccgggaaggtagaaccgccgtgccatcgtatcaccacaagtcagaaatgtatccgtaccggcgatattgaaaatgtaggtcgtacagcgcgtcaccataccttctttgaaatgctgggtaacttctcctttggggattactttaagaaagaagccattacctgggcatgggaattccttacagaagttgtcaaactggataaggaaagactgtatgtcaccatctatccggatgaccaggaagcccatgactactggcataagatgataggccttccggaaaaccacatttatccgctggcagataatttctgggcaatcggacagggtccatgcggaccggattctgaaattttctatgatcagggcgaagaattcggaacggatccggccaaccagatgggaggagacggtgaccgtttcctggaaatctggaacctggtattctctcagtttgatcagcagaaagatggctcattcatcccgctggctaaaaagaatattgatactggcgccggactggaaagaatggcagcagttctgcagggaaagaagaataactttgaaacggatctgttcttcccgattatggaagaagcgtcccgtctgtcccatgttaattatggaaccagcgcatccggagatgtggcattaaaggttattgccgatcattcccgtgccattaccaatatgatttccgatggtatccttccatctaatgaaggaagaggctatgtacttcgccgtgttctccgcagagcggttcgcttcggcaagctgctgggaattcaggatccattcctgggacagatgattgatactgttgtggaaatgatgaaaccggcttatccggaactgattgaaaagcaggctttcattaagaagattgccggcgtcgaagaagctcgtttccagtctacattgaatgctggtaccgatctgctttctgaactcatggaagacgctaagaagaagcatcagaccatgctggcaggttcttctgtattcaagctgtatgatacctatggattcccatgggaattaacagaagaaatcgcgcaggaacaggggctcaccatcgacaaggaaggctttgcggcttctatggaagaacagagggaacgtgcgcgtaatgcccgtgcgaaagtggctatgaaagtagctactccggatacaaccaaactgaatgtatccgaactgaccgtagaagataaggatggagaaacagaaattgtcctgttgggcaaggatggaaaggaaattgcttcggcggctgacggcgaagaagtaaccgttatcctgagaaataatccgttccatgcggaaggtggcggacaggttggcgatacaggccgtctgattgggcagtccggtgtcattactgtagaaaattgccgcaagcttccagatggcatcgcttaccttgttggcaatgtctctgaaggtgtagtagaagcgggcagcacagtccgtgcagaagtggacagagaaagaagacatgctctggcacgcaaccacacaggaacccatctccttcaggcagctttgaagcgtgttctcggaaatacggtaaatcaggcgggttctctggtgctcccggatagactccgttttgactttacctggccagaagccatttcctccagacagctggaagaagttgaacgcctggtaaatgacgaaatacttacaggaacagaagtaacattccgaaatatgccgcttgatgaagcaaagaagttgggagctatggctctgttcggcgaaaaatatggcaagattgtccgtgtagtctccgtaggggatttcagtatggaactctgcggtggcagccatgtttccaatgtaggtgaaatcggttctttccgtattatcagcgaaggcggcatcggttcaggggtaagacgtattgaagcgattaccggtaaggcggcttatgaagcggctctggcagaccgcaagctgctcgcacatactgcggaactgctgaaaggtaaggaagaagatattccagcccgcattgaaaaactggaagcagcattaaaggaagctaagaaggaagtacagaagctcaagagcgaacaggccagagattcgatgggaaatattctgtccaaggcacaggaaaagaatgggataccgttcctggcagccgttgtggcagctgataatatgaatgaattgcgtaagattgcagatatggtgaaggacaagctgcctggcggcgcattcattcttggctgcgcaagcggagataaggtaaacctggtaggcatggctgctgatgaagcagtacagcatggggttcacatgggtaaggtagtttcccgtgcagctaaggtttgcaatggcggtggcggcggtaagcctggcaaggcacaggctggcggcaaggatgtaaccaagctggaagccgctattacggaaggtgcaaaggttattgccgaaatgatcggctaa

SEQ ID NO: 2774 - DNA, 2844 bp, unclassified Dialister
atggattacagcaagactctgcacttgccagaaacagatttccctatgcgtggcaatcttccgaaaagagaaccaggctttgtaaaaatgtggaaggatatggacctgtatcatcagcgtctggaaaagagaagaaaagacggcgctccggcttttgtactgcatgatggaccgccatatgccaacggcaagattcacatcggtcatgcgctgaataagacactgaaggatatcattgtccgctacaagttcatgaagggctatgctgctcattacgtaccgggctgggatacccatggccttccgattgaatatgcagtattgaaggaatccggtgaagacagagccaccatgactccacttcagctccgtgaaaagtgccttgcctatgctaagagatggatcaacatccagagagaagacttcatccgcatgggcgttgtcggcgactttgaacatccgtatgtaaccttcgatccgcatctggaagctaagcagctggaagtatttggcgctatggccgacaagggttacatttacaagggtaagaaggctgtttactggtgcccgcactgcgaaactgcactggcagaagcagaaattgaatataaggacagaaaatctccgtccatttacgttaagttccctgcactggatgtaggtgacctggctccggaaggtgtaccgaaggataagctctttgctgtcatctggaccactaccccatggaccattccggctaacgaattcatcagcgtaaatccgaagttcacctatgtatgggttcataacctggacaatgatgaatactacctgatgaacaaggaactggctccggcagctctggcagactgcaaggtggaaaattatgaatttgcaggccgtgaaatgctcggcgcagaatgggatctcaagtctttccagcatccactgtatgaagaccgcgtagtctatgtactggaaggcaaccacgtaactctcgatgcaggtaccggttgcgtacataccgctcctggccatggtgtggatgactttgaagtatataagtcttatgaaaatgcaggcaagctgaagcaggaaattctctgcccggtagatgaaaagggccgtatgaccgaagaagcaggcctgggccttgtcggcaagactatctgggaagcggaaggtccggttatttccctcctggctcatgctggcagacttctgggcaagaagtccattcatcatcagtatgcacactgctggcgctgcaagaacccgattatttaccgcgcaacagaacagtggtttgcatccatcaatgatttcagagacaaggctctgaaggctgtggatgataccacattctatccggcatggggtcatgaccgcctttataatatgattcgtgaccgccaggactggtgtatttcccgtcagcgttcctggggtgttccgattcctgcattctactgcgatgactgcggtaagtatgtaattacccatgaaaccacacagaaggtagtggatatcgtagaaaaggaaggttccgatgcatggtggaagtacagtgcagaagaactgcttccggaaggattcacctgcccgcactgcggcggccatcatttccacaaggaaaaggatatcatggacgtatggttcgattccggttctacctggaacggcgtgctgaagaatccgcgtgaagaatggaagggtgctgcctatccatgcgatctgtacctggaaggctccgatcagcaccgtggctggttccacagctccctgctcacttctgtagctgttaacggacatgctccatacaaggcagtactgacccatggtttcactatggacggcgaaggccgcaagatgagtaagtcggtaggtaacgttgtagctccgcaggacattatcaacaagtacggcgctgacgttatgcgtctctggatttcctctgtagaatatcagagcgacgtaagactgtccgataagattatcaagagcatgagtgatgtatatcgcaagatcagaaatacattccgctacctccttggcaatctggctgacttcaacccggcaaccgatgctgttccttatgcagaaatggacgaactggaccgctgggcactgctccgtctggaacaggtgaaggaagaagtttccaatgcgtgtgaacagtatcagttccatgttatgtaccacgcagtacacaacttctgcactgtagacctgtccgcaacctatctggacatcctcaaggatcgtctgtataccgaaactgcggactccagactgcgtcgctctgcacagaccgctatgtatgaaatcctggacagcctggttcgcatcatggctccattcatctgcttcaccgcagaagaagtatggcaggctatgccagcggtagaaggcaaggaagccagcgtacatctggctgactggccggctatgaagcctcagtatctggacagcgcactggatgaaaagtggagcgcaagactggctcttcgcagcgatgtcatgaaggcactggaaaatgcccgtgcaaacaagactatcggccatccactcgacgcagatgtaaccatctacgcagaaggcgacgcatatgaaaccctgaaggctatgggagacttcctctctgacttcttcatcgtttccaatgtggaactggtcaatgacacctctgcggcaccggctgatgcactgaccaatgaagatggtgtacgcgtatccgtagcaccgagcaccagacagaagtgcgaacgctgctggaagcatctggactctgtaggatccaacccgaaccacccggatgtatgcgcacgctgcgcccgcgttcttgatgaagaaaaagaataa

SEQ ID NO: 2775 - DNA, 1800 bp, unclassified Dialister
atggatacgaaacatattagaaacttttcaattatcgcgcatatcgaccacggaaaatctacactggccgaccgtctgattgaactgacgggcacagtaaagaaaagagatatggaagctcagattctggataccatggatctggaacgtgagcgtggaattacaatcaaggaacagtcggcccgtctgatgtataagtacaaagatggagatgtgtatgaactgaatctgatagatacaccagggcatgttgactttaactatgaagtatcccgcagcctttctgcctgtgaaggggcgattctgattgtagatgctacccagggggtgcaggcacagacactggccaatgtatatctggcactggataataatctggagataattccggtaatcaataagatagatctgccgagcgcggatccggaacgtgtgaaaaaggaagtagaagatatcatcgggctggatatgtcagatgctatcgaagtcagtgctaagaccggctttggagtggataaggtccttgaacggattgtagaacagattccagctccggaagataagagtaaagaaccgctgcagtgtctgatttttgactccatttttgattcttatcagggggccattgcctacgtaagagttgtaagtggttctgtgcgtcctggaatggacatccgtatgatggcttctggcaaggtgtataaggtaacggaagtaggatacttttcgccgctgcctaaggccgatacggaattgccctgcgggtctgtagggtttatctgcgcaagcattaagaatgtacatgactgtgaagtaggagataccattactaccgcagaaaacggggcaacggaagccttgccgggatacagaaaggcgttgcccatggtattctgcgggctctatcctatcgacagcaaggattatgatcagctgaaggacgcactggaaaaactgagtcttaatgatgcagctctggaatttgaaccggaaacgtcaacagcgttgggattcggattccgatgcggatttttgggtctgctccacatggatgtggtacaggaacgccttgaacgtgaatatcatcttaaacttattactacggcaccatctgttatttataaagtgtacaggacggatggggaagtggttatggtagataatccatcggcattgccaccacagaacaacattgaacatattgaggaaccaatagctaaagtggatattctggtgccatcggatatggtgggcgctgttatggaactggcgcagaaccgtcgcggtgaatttattaccatgacttatctggatacgacccgtgtcacattgacttatcgaattccgctgtcagaaattatctttgatttctttgataaacttaaatcatccaccagaggctacgcatcactggactatcagctggatggttatcaggatacggatgcggtcaagctggatattctcctgaacggagatcttgtggatgcgctgtctgtgattgttcacagaagtaatgcggcatcgagagggcgctccctggcacggaaactgaaggacattattccgagacagcagtttgaggtaccgattcaggcagccattggcagtaagattgtagccagagaaacagtaaaggcctatcgcaaggacgtgctggctaagtgctatggcggggatgtaagccggaagaagaaacttctggaaaagcagaaggaaggcaagaagcgtatgaaacaggtaggaagtatcgagattccacaggaagcgttcatggcggttcttcagaatgacgaataa

SEQ ID NO: 2776 - DNA, 3204 bp, unclassified Dialister
atgaaaagaacggatgtaaaaaaggtactggtcattggatctggcccaatcgtaatcggccaggctgctgaattcgactatgctggtactcaggcatgccgttcccttcgggaagaaggcatgcaggttgttctggtaaacagcaatccatccacgattatgaccgattcggatattgccgacgctgtgtatatcgaaccaatcactctgcagttcgtaaccgaagttattaagaaggaaagaccggatgcactgctggccaccctgggcggtcaggtaggtcttaacatggcggttcagctggcagaagccggtgtactggaaaagtacggcgtaaagctgctgggttcctctcttcacgcaatcaagcatgcagaagacagagaactgttcaaggaagccatggaaaaaatccatcagccggttccggaaagtgaaatttttgaagagctggaaccagctgtcaggtttgccgatagcattggctatccggtaattatccgcccggccttcacccttgggggaaccggcggcggtattgcccatgaccgttatgaaatggaagaaatcgccaaccgcgggttgaaactgtctccgattaaccagattctggttgaacgaagcgtagccggctggaaggaagttgaatatgaagttatgcgcgacagcgcagataactgcattatcgtctgcagcatggaaaatatcgacccagtaggcgttcatactggcgattccatcgtagtggcaccgactcagacactgaccgatggacagttccagatgcttcgtaccgcgtctatcaacattatccgctacctgggcattgaaggtggatgtaacgtacagtatgcgctggacacccgttccaatcagtactatgtcattgaagtaaatccgcgtgtaagccgttcttctgcactggcatccaaggctaccggctatccgattgccaaggtagcggccaaggtggctctgggaatggccctggatgaaatcacaaatgcagtaaccggagataccaaggcctgctttgaaccatctatcgactatgtagtatgcaaattcccaagatggccatttgaaaagttcactctggcagaccgccagattggtacccagatgaaggctaccggtgaagtcatggcacttgaccgtacattggaaggatctcttctcaaagctatacgttctctggaagtaggagaaggctatctgcatctggctaaactggacagccagtcgctgtatgatatccgctgcctcctgcatagaacagataatgaacgtatatttgtggttgcagaagcgcttcgccgtggaattgaaccagaagaaattaatcgtattacccgaatcgatctgttcttcctgtataagattcagaatatcattcatatggaaaagcgtctgattaaagaaggtctgacggaagaaactctggtggcagcaaagaaaattcaaattccggacaaagttattgccaagctgagcgatactaccatcaaagcggtcagagccatgaaaaagaagatgaaccttcatccggactttaagatggtggatacctgcgccgctgaatttgaagcgaagacaccatactactattccacctatggcagtgaagatgaagtacagccgcagggcaataagtccgttgtcgtatttggttccggcccaatccgtatcggccaggggattgaattcgattactgctcagtacacgcatcctgggcactccgcaaggctggccataaggctattgtcatcaacaataacccggaaaccgtatccactgactttgatacatcagatgctctgtacttcgaaccacttaccgtggatgatgtcatggaagtcattgaaaaggaaaagccggaaggggttatctgtcaatttggcggtcagacagctatcaatctggctactcctatggccaagagaggaatacgcattatcggatcttccaatgaaagtatcgatatggcagaagacagagaacgttttgatacgctcatgggacagctgggcattgccagacctaaaggctgtctggtggaaagtgaagccgaagccattgaaaagacacaggatctggattatccgcttatcgttcgtccaagctatgtacttggcggtcgtgcaatgcagattgtatatgatgaacacgaactcagaacctacctgaaggaagccgttgttgcttctcatgaacatccggtactgattgaccagtacatggttggccgtgaagtggaaattgatgctatttccgatggtattgatgtatgcattccgggaattatggaacagattgaacgttccggtgttcattccggggactccttcgccgtatatcctccgcagcatctgagccaggagattatcgatactctggctgattacacgaagaagattgcgattgccatgtccgtaaagggtctggtcaacattcagttcattgttgtgaatgaccgtgtgtatgtaattgaagtaaacccaagagccagccgtacagttccattcatgagtaagattaccggtatcaatatggtggaatatgcaacaagaatagcactgggtgaatcgctgaaggataccggacttccacttggactggttccaccaaagaattatgtagctattaaggcacctgttttctctttctccaagctgggactggtagaaatcaagctggggccggaaatgaagtccactggtgaagttatgggtattggacatacctatgaggaagccctctataaggcagtcattgcggctaaccttatgattcctgcaggcggcagcatcctcatcacggtaagcgacagagataagaaggaaaccgctaacctggctcgcggatttgtaaaactgggatacaagctggtctgcacttccggtacagggagctatttcaagagcctgggcattccggttgaaatcattaagaagattcatgaaaagggcgaaaactgtgaaaagtatctgaagtccgggaaggtagacatggtactcaataccatttcctacggcagccagattgaacaggaaggctatgatctcagaagaatcgcagtagaactggctatcccgtgccttacttcactggatacagctaaggaagttctccgtgtcatggctgaagacgataccgaagcaagccatcatgtggaatctattcaggaatatgtaaaggagtaa

SEQ ID NO: 2777 - DNA, 3543 bp, unclassified Dialister
atgaaattaatacgccttattttgcagggatttaaatcttttgcggacaggacgaccattgatttcgcagagggaatgacggtcattgtcgggccaaatggctgcggcaaaagcaatatttctgatgcagtgagatgggttctgggagagcagaacgtcagaaacatacggggacagaaagcggaagatatcattttttctggatcagaaaagagaaaggctaaaaatgcagccatggtcagtttgattctggataattccggacatgaactgcctctggatacggcagaagtttctattacccgcaaaatattcagaaatggggacagtgaattctatattaacaagaggtcctgccggttaaaggatatacaggaactgctggctaatacaggaatcggtaagggctccatggtgattatcgggcagaatcaggtggatcggattctgtcagcccgcccggaagaacgtcgtgtcatttttgaagaagtggccggaatcagtaaatacagaatgaaaaaggtagatggcctcagaaaactggaaaaggcatcggccaatacagagcgtgtactggatctgaaggcggtaatggaagagcagagcgagccgctccgcgtggaagcggaaaaggcacggaagtactgtgccctgcagaaggaaaaaaagacaggtgcagtgacggccgcactgttaaaactgagtgcagcccgccgtatgatggcacgctatgaaaatgatcagatccggctggaagaaaagaaacaggaagccatggccagactggaagaagtgggacgtctgcagaaacagctggaaaatgaaatggggggacatcagaaggcattaagtgcggcctcaggtgagctggcagataaaaaggcacaggcagagcagcttcgtggagattgcagagtgcaggaagaaaatctgaaacatgcctctgaagagctgaaccgcctgacagagcagagagaagacgaacagcaggcccggttggaatgccgggaagatcatgaggcctgccgggaggaattggaagctgttcaggcagaactccaaagcggcagggaacacctggaagcgattaaacagcagaaagagcttttggaggaaaaacttcttgcgtctaaggctgaatatgcacggcagctgcaggcaacgcaggaatccatagcacagcatgaacgccttgttcaggaaaagaatcatagggaggaagataagaaccgtctggctggagaggcacaggctcatgaaatgcggtggaaggtgctggaagaagaatgcagtaaactaaaggaagaaaaagcagaacttacccggaaacatctggaactggaggttaaactcagtcaactgactgaaaaaggaaaagaagatgcagcggcccgggataaggcggagaacatacggtacgaaatgcttcgccggttaaatgaatggcaggcagaggaaaaacaggttcagctgagacggaaggacctggaaaaacagatggaagagcatgttaatttctcccataccaccaggacggtactgcaggcctctgaggcgtggagtcagcatattatcgggccactgggagaactgatccgtgttccggaaaaatatacggcagctgcagaaattgcactgggaagtatgatttccaatctggtggtggacacatcggaaacggctcagacaattatcagctggctgaaaaaccggcatgccggaaggactacgttctacccgctggattccatgtccggatatccggtacgggagattttacaggcagccagggagcctggaatatgtggcattgcagccagtttgttcgagcatgatgaaaagatttccggtattatgcaatccatacttgggcgaattctcattgcggaagatatggatgctgccagacgtacagcgaaaaaataccgataccggttcagaattgtgacactggacggtcaggtagtcaatgccggcggttctatgaccggcgggtctatgcggaagaaggacaatacatattttggacgtaaatcggaaataaagaagctggcggcgaaagagaaggcgttacacgaagaaatcgggcagcagcgagcagcgaaagaaaagcaggatgctttatgtgaatctctgctggcagcgatcaccagggaaagggaagaatggcagaaccggtccattgaagcggcatccatgaaaacccggctggaaggaatggaaaaagaactggcagggaaagaagaaaccgcacagatggaaaagaactctctggagatggccagaagccaatgggagcaggctgaccaggcctgcaggcagctttgtgaacagctggaacacgcgcagaaaccgggaaaacagccggaaaaagatgaaaagagtgcgcagcttcaggataaggtcaatgcactgaatgaacagataactgatgcccgggtacagctgacccgtgttgaatccaatgtggcgcagaaacaggaagagataaataaacttgtggaggcagacgaagaatccggccggacgctggaacggctgcaggaagccatagaaaagaaaaagcaggcggtctccgacatcaatgtacgtctgaaggcacagaagaaacaatgcgaagaagcggatcagcactggaaagttatggaacagaaacggcagattctggaacagcaggccggcgatttttccaggaggcgtatagcgctcgatgaagactggaaaaaagtgcaggcccagtatgctgaggcggacagccgtatgtccgggctggatgcacggttggaatctttcaggaatgatgagtcacgcgaactggatacgcttacatccatgggccttacggaaaagactgcagaatctttccgcataaaaggctccggagaggacataaagaaaatgctggcttctgtggagaagcgtatagcagaactggggaatgtaaaccctcagggagaagctgagtatgaagaacatatggagaagctggcattttacgataaacagcttgaagatctcagaaaatcagaagaaggtctgcagaagattgtccatgaaattgatgacgctatgacagctcagtttaggcaggcatttgcgaagataaatgttgaatttgggcgtataatgaaagtaatgttccggggaggaaaagggcacctggatctgacagataaggtgaatccgcttaatggaggtattgaattatacctccagcttccaggaaagaagacccagtcactgactctcatgagcggcggcgaacgggcacttaccgtatgtgccctgcttctgtcctttatggcttatagtccggctccattctgtttccttgatgaaattgatgcagcgctggatgatgctaacgtagaaagatatggccgtatgattgaggactataagaagaaaacacagtttattatcatatcgcaccggaagaaaacaatggaatttgcagacacattacagggcgttaccatggcagaaaaaggggtatcgtcactgattactgtacgtgtgagcgattatatcaaggaggaataa

SEQ ID NO: 2778 - DNA, 1842 bp, unclassified Dialister
atgcatgaaaagagactggccgtgtttcgctttttttctgaaaacacagccagcttttttcgcattaatgtttgtcagcaggagtcagggctgtattttgtttacatacggcttcatgtgatagaatataaaaaagctattcatattggaggaacagaaatggatacaaaaattgaagcttctaattttatagaggcagaaatcaataaggatattgaaaataatgtgtacgccaatggcagagtactgactcgtttcccgccggaaccaaatggctatctgcatattggtcatgttaagagtatctgccttaactttggcattggtcttaaataccatggcgcaaccaatatccgttttgatgataccaatccatcgaaggaaaatgtggaatacgtcaattccatactcaatgatgtaaagtggctgggattccagtggaaggaaccggttcattatgcatctgattatttccctcagctttatgaattcgcatgcaaactcatccgcaaaggacttgcctatgtagatgatcagaccagtgaagaaattcgaaagaaccgcggcgatctggaacacccgggaattgacagcccgtacagaaaccgttcggtagaagaaaatatgaagctgttcgaagaaatgaaggcaggaaaatatccggatggatccaaggtacttcgtgcgaagattgatatgaaatctccgaatatcgtaatgcgcgatccggttatttatcgtatccttcgggcaacccatcacagaacaggcgacacctggtgcatttatccgctgtatgactttgctcatccgctgtctgatgcactggaaggcattactcattctatctgcactgtggaatttgaggaaagacggccactgtataactggtgcctggacaatgcttttgatggcaaagaaaagccaagacagattgaatttgcccgcctgaatgttacaaccatgatcaccagcaagcgaaaactccgccgcatggtagaagaacacgtggtttccggctgggatgatccacgtatgccaaccatctccggactgagaagacgcggctataccccggaatctctccgtaacttctgtgatatgatcggtgtagctaaagccaacagtacggttgatgtaggtatgctggaatactgcatcagagaagatttgaaggataaggcaccaagaattatgacggtggttgacccaatcaaagtggttcttactaactatccggaagataagaccgaatatatgactctggaaaacaatccatccgatccggcagcagggaccagagaagtaccatttggaagaaatcttttcattgaacgcgaagatttcatggaacatccggtaaagaagttcttccgcatgactccgggcaaggaagtccgtctcaaaggcgcatatattgttaagtgcgatgaagtcattagggatgaacagggagaaatcaaggaaattcattgtacagtagacttctcttcccgcagcggtacaccgggggcagaccggaaggttaagggcactcttcactgggtcgctgaaaagacagcggttgatatagaatgccgtctgtacgattacctgattccaaaggacgatgtggatgatggccgggatttcatggaaaagattaataagaattcgctggtagttaagcatggtaagtctgaaccggctattcttaattacaaggcaggagatagattccagttcctgcgcaagggatatttcattctggatccggataccacagaaggtaagccggttgcaaacctcattgtaggacttcgcgatagctgggcaaaggcaagacagaaggctggtaaataa

SEQ ID NO: 2779 - DNA, 2157 bp, unclassified Dialister
atgaaaaattcagagattcatgcagtgcacagtcactatcgcaggccgcagaggaaaaaaacgcctttgtggaaaaaactgtttatggcactggttgtgatcatggtgatctgcgtcgctggagccggggctggtttcctgctgtctatcaccgggacgctgcctgacgtaagtcagactctgtcgccagcggcctcttctcagatttatgactgcaagggccggttgattactacggttcatgcggaacagaatcgtcttcctgtcaagctttcagaaacgccgaaggaactgcagaatgcattcattgcagcagaagatatccgtttctataagcatcatgggattgaccctatcggcattgcccgtgcggtagtaagcaatatccgtcatagagacgcgaccggacagggtggttccaccattacccagcagctggcaagaaacgcgttcctcacacaggaacagacgctgaagagaaagctgctggaagccgtactggctgtggaaatcgaaaacaagtacaccaaggcggaaatcctggaaatgtacatgaatcagatttatttcggccagggtgcgtatggcgtacagaccgcttcccatgtatattttggcaaggatgttaaggacctgaacctggcgcagtgcgctatgctggccggtcttccgaacagcccgaattattattccccgttccacaacctgcaggcggctaagtaccgtcagggcgtagtactggatcagatggccaagtatggctacattactcaggaacaggcggatgaagccaaggcgcaggatctgggcctggttaagccggggtccaatcaggacaacaataaggtagcgtcctatttcgttaactacgtagtacagcaggtaagcgacaagtatgactcttccgctatttacaaggaaggtctgaagatttacaccacactggatctggatatgcagaaggatgcagaaaatgcggtgaacaaggacctgccgaaaggcacaaagaatgccaagggcattactcagccgcagggcgctttgctggctattgaaaccaagaccggcgatgtaaaggccatggtgggtggacgcggagaggaccagtttaaccgagctacgcagatgtaccgtcagccaggttctgccttcaagccgtttacctatgtaaccgctctggaaaagggcatgagcccgaatatgatgctggataacagtgcggtaagctttgccggcggatggtctccgaagaactacggacatactaccggcggcccggtcaccatgaccgaagcgctggttaagtccatgaacattccgaccattaacctggccaacaaggtaggcatgtccaatgtcatcaagacagccgaaaagtgcggaattaccagtctggtggattccggtaagtacagcgataacaacctgtcagcttccatcggcgggttgtccaagggggtatccctgtgggatatggcacaggcatacagcgtattcgccaataatggtcagctgattaagccgagagttatcctcaagattgaagaccgcaacggcaacatactggaagatcataccggagaatcggatgcagaacaggtactggatgccaacgcggtagcacgtcttaatgtgatgctccagcaggcagttatgagaggtactggacgcaatgcttacttcggacgtccgttagccggtaagaccggtaccacaaacggtgcacacgatgcatggtttgtcggatatacaccgaacatggtcactgcggtatggattggtgatgatacctctaccaacgcgggctataccggcggtaccattccggctattattttcagagactttatgagtcaggctacagccagccagtctgcatcttcgttcaatatcccggcttctattcagggagaactggctaaggcgcagaatgaggctaaggccgcagatcagcaggctcagggagatgaagccgttccggatcaggatacttccactacggaaaccaacactcaggattccggaaagaattctcagagccggtcctccccggataagagtgactccggaaagaagcacaactcatcccaggatcaggccagaaggtcagcggcaaaggcaggcaagaacatccttgaccaggttgccggacagtaa

SEQ ID NO: 2780 - DNA, 1965 bp, unclassified Dialister
atgaaacacagaaatttcgaggcgggtatggaagagcttagtaatatgctgaatcgacttcttcatcggggggatgaggaggaaatcaggcaggatgaactgaaaaaacagatagacgccatttaccggatctatgcagggacagtaggacctgaacagctgattataaacgccggaaagtatgatgcactgaaatatatacatgatgaaaatccagggaaacgactgcttggtctgcagcggctgattctggaaagcagggattatcatattcccccatcgccggaagatatgccggtagtgatggacaagctggaaaaccggctgtctgaactgctggcccggcgcgcagtggaagagcggctggaacggaagattgctgccaggctggaagaacggcagcaggactatgtcaatgaaatccggaaggaaatcctgaaagaagagggagcaggggaaaccgagcaggaaaggaataaactggaaaagctgaaagccctggatgaaatacatcttaccgactcagcgcttgctcaggtgcgcccgcagaagctttccgatattgtggggcaggatgacgcagttaaagccacagcagcccgcattgcttctccttatccgcaacacctgattctgtacggtccgccaggtgtgggcaaaacgaccacggcgagactggtactggaagaagctaaaaaacgggatagttcggtgttcgggccggatgcgccgtttgtggaatgtgatggtaccaccctgcgctgggacaaccgggatatgaccaatccgctgattggttcagtacatgaccctatttatcagggagccagaagaaatctggcagattccggaatccctgaacctaaaccgggcctggttaccagggctcatgggggcatactgttcatcgatgaaatcggtgaactggatccgctgctgctcaataagctgctgaaagtgctggaagataagcgggtattttttgaatcggcctactatgatgaagataacaaggccattccttcctacatccggaagcttttccgtgacggagcacctgcagatttcatccttatcggggcgacaacccgtcagccggatgaaatctgtccggctatccgatcccggtgtgctgaggtgttttttaatcccctgcagccggaagacatatcccgcattgtcagagaggcggccacacgtcttcatgtaaagctggaagatggggtgccggatatggtgagtgaatataccatggaaggacgaaaggcagtaagcctgcttactgatgcttatagcctgtctgtttatgaggcggatggatgcaggcaggtcaccgtaaccagggatacactgaaagaagcagcccggtcggcccatctgactccgtggcaatttcgcgtggcatccccggtgcctcaggtgggacatatttacggactgggggttgccggttactgggggagcactattgaaatagaagcggtggtacacccactgggaaacagagaaaaaggtaccatccattttaatgacaccgcagggtccatggccagagattcagtaaccaatgccagctcggtggtgcgcatgattacaggaaagaacctttctgattacgatgtgcatgtcaatgtggtagggggaggaaatattgatggtccctctgccggagcagccattacctgtgccatcatttcggcacttacaggaaaaccgctgcgtcaggatattgcggtgaccggggaaatttccctgtcaggaaggataaagcctgtgggtggcattgcagaaaaggcgtttggtgcccatcagggaggtatgaaggccatcctcataccgaagcagaatgccctggatatgggcagtgaatatatgcatatgaaggttatcccggtagataccatacaggatatactggaacatatgctggtaagaaaaaaacagaaaatgaaggggagtaaataa

SEQ ID NO: 2781 - DNA, 2133 bp, unclassified Dialister
ttgaaaatctgtaacctggattatttgccggttacagatttttttgttccatatccggcgatggaaagcgctgaattttgggagtggatgagggaaccagggctccttcatttctgttatacgacaccgcctgctctgtctgataagtatgaccattgttttcgtgtgctaaatcatgtaaaattggggagtatttgtaatgaaacagtaaaatgtgtaaagcatgataaaaacttttcgaaaggagtcacacaacacatgtttagctttatcactgaccggggatggaaagcggtgtggacagctgttaccctggcatcttttgccgttatgtttgctctgaattttctgtttggctcaccgggtggtctggtctggtggtctatgataaagatttttattctggcattacagtttggcgggattacggcctatctgttcaggaaaaatctgaagaaggcactgctgagtttctggattaccgtgttgtgtctgggactgttgtctctgattgctccggttcttgctccttttgccaaggtggtaatgaatacagaggatacatcctttgaaatggcgactccgctattccttctgtttaccggggttaccgcttcctggctcattccaggaccaaaagggcgtatggccgtccgtatattgtgggctgtatttgttttgctgtactgtctgattcagtttacctatatcggctattttggacttactcatgcactgatttccgtcaatatgatgcttgccctggcacagacgaatctgcatgaagctctggaatacatcagtgttaatattccgctgcttaatcttgtcctggcagtagcagcgctgtttgctctttcttatgttattttccgcgtttccgggtatttctttgttggtcccagagacgtatctggccgcacgaaaaaaggggttgtccttattctgatttttgaagtagctgccttgattttctgtttttcccaaacccggattgcacagacagtggcacagacacaggacactgtgaaaagttttattgaatatcagcacatggtggaagagcgtcggcataatgttattaacaacaagcatctgtccaacaaactaaaacatgcaccggatggggtatatgtacttattatcggggaaagtgagactagagaccatatgggtgtctatggctatccgagagataatactccttttgagacggaagcggctgaaaataaggactatactttctttactcatgcttactccagctacacacagacggtacagtcattgacctatgccctcactcagaaaaatcagtataacaagattcctctggtagacgcctattccattatcgatatggccagagcggccggattccgtaccacatggatttcaaaccagtcccgctttggcatctgggatacccctattggcgccatcggctcggcctgtgatgatcagcactggatgaatgattatattggtactggcgtacagacaaaggattatgactctattctggtaccgcagctgcagaaagtggatcccaacaaccgccggcagcttatcgtcattcatctgatgggaagccatgtaagttactgggacagatacccgcatgatggattctataagtacccgctggaccagtcgaagacccggtctaaggatcaggttatgattgatgaatatgataacagtgtcctgtacacggatcatgtcctcagtgaaatcatgaatgtggctattaaccatcttcatgcggatgaagttatgtatttctccgatcatggggaactggtaactcagaatccgggacacaatgcagatcagtttgaattccagatggttcatatcccgttctggatttatacttctcctgaatatcagaagaaacatccggctgaattcgcagcgatgaaacggcgtaagaactggctgttcaccaatgatatggcatatgatactctgatgggaagcatgggcctcacctcagttaagtatgacccgacctgtgatttctttagcagaaaatatgataaggatattaccaacatgatgactatgtacggaaatatctggctccggaaggatgtaaaggcactgggaacgaattataagaaccagtaa

SEQ ID NO: 2782 - DNA, 2370 bp, unclassified Dialister
atggataccctggcagaagtcattatcaaccggccatccaagcatctgaaccggactttttcctaccgtattccggaagagctctcttttctctgcgaaggatggcgatgcatagttcctttcagtggacggacagaagaggcaatcatcctttccacacgggaggaagatatctccaggctgacctattccgttaaggatatacagggagctgtagatacattccgctattttactccggaaatgctgaagactgcatggtggatatcttcttactatctctgcacactgatagatgccctgcgcctgttccttattgacaagaaagggataaagacaaaggtctactattccctgtgctgggataagattcccagggaccatcccctctggggactgattgatgaatcggtggaaatgcttacagaggaagaccgtctcctcctgtttacggacagtgagtttgctaaagctctgtccaatgggtatatcgcccgccgggaatcggtaaaggcctcccatagagaaccgctggaacgatggatagcgccaacgcttcccattccggaagaagaaacggcccggaaaaagaaacaggttctcctgtatgcctttcttactgaacatggctcggtaccggtaaaggaaggaaagaaacagggattttccatggaagtcatgcgttctcttgtccagggcggacacgctcgttttttctataagaagaaggatacctattccctcattggggacagcggacagttggcacataaggaactgacggaagagcagaaaaaggcatgtgaacagattattcaggcggaaaaggaaaagaagttccaaggcatcctccttaaaggggttacagggagcggaaagacggaagtctatgtgagagccgccgatcaggcgctggccatggggggtatgtctctcatccttgtcccggaaatcgcgctcacggtgcagatggtttcttattttgctcatcattttggagatgatgtggtatttattcacagccagctcagcaaaggggaacgatataacaaccgcatgagggtagagcggggagagagtcatgtcatcatcggctcccgttctgcgctgtttatgcctttcaaaaaccttcggctcatcgtagtggatgaagaatacgattcctcctataaacaggatgagacgcccagatataatggatgcgatctggccaaggttatggcggtgacctatcagtgtcccatcgtactgggcgcggccactccctcagtgaatacctattacgcggcaaagacaaatcgtatttcccttattacgatgaataagcgggtctttgaaactccgctgcctgaagtaagcattgtagatatgaaacagcctcaggctctggtgcagtcgccgcttttctgtgacgcactgctccatcttctgaaaaagacagtgaacgggggaaaaaaggccatcgtctttctgaaccgtcgcggctacgccaccacactcatgtgcactcactgcggatatgtgtttaagtgtccgcactgtgaagtgtcccttgtatatcacaaggaccggcagcgccttcagtgccactactgtgaatccagttatccgcttcctcaggaatgtccgaaatgtcattcacagaaaatcctgtacagtggaagcggaacgcagaagctggtagaaaatctgtacactctggtcccccaggcacgcattgccagacttgacctggacagcaccaggaataagaacagcgccagggatattctggatgatttccgaaacgggaaatacaatattctggtaggcacacagatggtggccaaagggcatgatattccaggtgtacaggcggtaggtgttgtaggtatcgatacgattctgaaccttcctacctatctggcttcggaacatgctttcacgctgattacccagtgtgccggccgttccggaagagaccgggaacaggggcatgtaatactgcaaacctatactccggagaactttgtcatacaggccgctgccaggcaggattatgaagccttctatactcaggaaattcagttccgtaagcttctgggatatccgccgtttatgaaactgcttaagatttcctgctttggaaaggaataccgggccgtgcgcgaaagggccgcccgtgtatacgcatggctcaggcgggaaacgaggcaggcagattccctccagattacgccgccgtatgatgaagcaattaaaaagaaaagggatacctattacatttccatccttatcaaagggaaggatctggcacctcttaagcagaaaatacgccagtcctttatacttcaggaaaatggtataattatagatgtagatccgttataa

SEQ ID NO: 2783 - DNA, 2850 bp, unclassified Dialister
atggaaaaaggaatcgttattcagggggcaagacagaataatctgcagaatatcagcctgacactcccgagaaataagctgattgtattcagtggattgtcgggatcgggaaaatcgtccctggcttttgacaccatttatgcagaaggacagcgtaaatatgtagagtcactctctgcctatgcccggcagtttctcgggcagatgaataagcctgatgtagataaaattgaagggctgtctccggccatatccatcgatcagaaatcgacaagccataatccaagatccacagtaggcacggtgacggaaatccatgattatcttcgtatgctgtttgcccatgcgagccgtgcgttctgtccccggtgtggaaagcctataaagagacagaccgtggatcagattgtggatgcagtagaggacatggaaccgcgcacgaagattatgattctggggccggtggcatttggcaaaaaagggacgcacaagaagctgcttgaacagcttcgccgggaaggatatgttcgtgtacgtgtggatggagccatccggattctggctgatgatattgttctggaaaaaacaaaaaaacatacgattgaagtagtggttgaccgtatcatcataaaggaaggaatcaccaagaggcttaccgattcggtggaaacagcactgcagcttggcaatggtatggtgattgtcaatgaaatcggcggagaggatcacatgttcagcgttcatttcgcctgtccggaatgtgggatttccctgcccaaaccggagccaagaatattctcattcaacaatcctctgggggcatgtcctgcctgcacaggcctggggtcatcccttgaagtggattttgagcgggtgatgccagataaggacatatccttccgccagggggccatacggccatttccggtaaatccggatagctggctcatgcgtcagctgggggcactgcttaaacattacgacctgaccatggatagctgttttaatgatttttccccagaagccaaagacgtctttatgtatgggggcggagatccgctggattttgaatacgagaatatgcgcggcgaagtaaagcagtatacccgtatgtttgaaggcatcatacccatggtaaaaaggcgatatgaagaagcgtttacagataagatgaaagaagatctggcagaatatctggtggaacgtccatgcccggtctgccacggggccaggctgaagcctgaaatcctggcattcagaataggaaataagaacattgcagaaatttcagccatgtcagtcagcgcgattctggactttttccgtcatgtcgaaatgacagaaaaagaaaagattattgccgctcagattctgaaggaaatcagaaatcggctcaccttcatggtcaatgtagggctggattatcttaccctggcaagaagtgcggcaacgctttccggcggcgaagcgcagagaatacgtctggctacgcagattggctcagggctggtaggggtactgtacatactggatgaaccatccatcgggcttcatcagcgggataatgaccggctgattgccacattgaaggggatgcgcgatctgggaaatacagtaattgtggtggaacacgatgaagataccatccgggccgctgactgggttgtggatattggcccaggagccggcgacaacggtggccgggtaatggcggaaggaacaccgcaggaaattgaggccaatccggcttccattaccggtctgtatctatcagggaagaagtatataccgcttccagaacatcgcagaaagggtaatggccttttcctgcaggtcctcggagctcaggaacataaccttaaaaatattgatgtatctattcctctgggggcatttactgtggttaccggtgaatccggttcaggcaagagtacactggtaaatgatattcttttcaaaggcctgtccaataagctgaataagacgccttttggagccgggaaatgccgggaaatacgcggagctgagtatattgataaaataattaatattgatcagcagcccattggacgtacgccaagatccaatccggccacctatgtaggggttttcagcgatatacgtgaactgttcagccagacctcggaggccaagatgagaggctataagccgggacggttcagcttcaatgtaaaaggtggacgatgtgaagcctgtcatggggatggcatcataaagattgaaatgcagtttctttcagatgtctatgtgccctgcgaagtatgtcatggcgcgcggtataaccgggaaacactggaagtccattataaaggaaagaatatttatgatgtactgaatatgacagtggatgaagcgattcctttctttgaaaaccatcctaaaatcctgcggaaactggaaacaatgcaggaagtggggctgggatacatccatctgggacaaccggcgactaccatgtcaggcggggaggcgcagcgtgtaaagctggcaacagaactgatgaggagaaatacaggggataccctgtatatcctggatgaaccgacaacaggccttcattcagaggatatacgtaaactgctgctggtgcttcagaagctggtcgatgccggtaacacggtagtggttattgaacataacctggatgtgatcaaagtagcagactacatcattgatctgggaccggaagggggcgaccggggcggcgagattgtcgcggtcggcactccggaagacatatgccgtgagaaaaaatcctatactggacagtatctccggatagttatggacagaacgaagaaatttatggaaagggagaagcatgattga

SEQ ID NO: 2784 - DNA, 2046 bp, unclassified Dialister
atgagccgggaagagacatacgacgtggaaagcgggaaatttctgcgtatcagggaggtacgtatgcttagcgaaatatggatatacaagaaaaatgaaaagatatttcttgttacgttgtttctcctgctcgtagttattggttgtctgaactggatgctcggactgcttacagctatagttatcattggttttgttatcgttatcgaaaaaaatgattacaagcaggaacgtattcttctcaattatcttgacgagttgtcggctggcgtagaggcagggacaatttacgcagtaaagaatctgccgcttggcatctcacttatggatgagaaacgtcagtttgtatgggccaatggagttttccgctcctggcttaaagcggatattgaagaagataatctgtttaaagatgtattctcaggcgtgcgcatcagcaaaatctggggaaagaccggatggtttgattacagtctggatgaagaatactatcgtgtgttttacaagtttattccgccatcgaaagaaaacggggcggcattcatggccttttatctggtagaccggacagccatgcagcagcagatacaggcatgcaaagaagccatgccggtattcgggcttatccgggtagataatgtggcagaagctacccagaatatgaccgatgtggaaaaatccaatattctgtcagaggtggatgaagttatcctctcggaatttatttcccgggatgcatttattaagcgatacagctcgacggaatttgtcatctgcatgtccagaaaagcattgaaggactgcatgaacgacaattttaaaatactggataaggtgcgcgatattcatacagtaaaccgtattccagtaaccatttccattggtattgtaaagtgtgaaggtacatttgccaaacagtttgaactggcgcagacggcgctggatctggcactggggcgtggcggcgaccaggcgattgtccgtatggacaaggatgtaaaggcctttggaggccgctcttccacatccgtcagctctacccgtgtccgcgtccgtgtagtggctcaggccctcagggaaatcatccaggaatccgaccgggtattcgtcatggggcacgggcatgaggactatgatgccatcggtgcagccgtaggggtgacacatctggccaaggcgtccgggaaaccggtaaatatcgtcctttcagcctatgaagacacatcccataagatgattaatgcgctggatgcagataaggaaatgggtccaatgctgatgacggaaaagacagctctgaatatcatcactgacaagagcgttctcttcatcgtggatacccatgtaccgcaggttgttgccgcaccggaactgctccgtgcagccaagaagagagtggttattgaccatcatcgcagaaatgcatcgattatttctccgaccctgcttacgtatatggaaccatcggcctcatcggcatctgaactggtgagtgagctcattcagtactatggtggagatagggatctgactacgctggaggcttcctgcctctatgcagggctggttgttgatacaaagaatttctctgtgcagaccagtgtacgtacatttgatgcggccagctttctcagacgaagtggtgcggatgcaaaacttgtacgcgccctgtttgcagttaatgtagaaactgttagaattaagtcagagattatggcccatctcaaaacggtggatgggtacatggtctttgccgaatgcccggcaggtactgagcaggcgcagattattgccggacaggtagctgactatctggttacagtggaaggaatccatgcaagttttctcttctatcatgttgaggaaggggttaccagtatttcggcacgaagcgatggaacggttaatgtacaggtggttatggaagctctcggcggcggtggacatctcacggtatccggagcacagatcagcggtgacatgaccatagaagcggctactcagaagatagtggaggaagtccgcaaacaaattaaggaggcataa

SEQ ID NO: 2785 - DNA, 1506 bp, unclassified Dialister
atggcaacctatattaatgaaccagcacacacttttaatgaataccttttaatcccgggatatacttcttgtgaaaacattccggccaatgtatcccttaaaactccgttggttaaatttaagaaaggtgaaaaaccagctattacactgaacattccaatggtatctgctatcatgcaggctgtatccggtgaaaaactggctgtagaactggcaaaaaatggcggcgtttctttcatctacggttctcagaccgctgatgatgaagcaactatggttgcaagagtcaaagcggtaaaggccggctttgtaccaagcgattccaatctttccccggaaaatacactggctgatgttctggcacttaaggaaaagaccggacactccactgtagctatcacagaagatggcaccgcaggcggcaagctggtaggtattgtttccagcagagattatcgtccaagccgcatgaatccgtctgacaaggttgctgatttcatgactcctctctcccagctggttactgccagatatggtgtaaccctgtctgaagctaacgacatcatctgggataacaagctcaattctctcccggttctgttcgatgacggaaagctctatggtttcgtattccgcaaggattatgattcccacaaggaaaacccgaatgaactgctggatgaaaataagcgtttcattgtaggcgctggtatcaattccagagactatgctgaacgtgttccaaagctggttgacgctggcgctgacgttctctgcattgactcttccgaaggttattctgaatggcagaagattaccatcgactggattcgtcagcactatggtgacaaggttaaggttggcgcaggcaacgtagttgaccgcaacggcttcctgttcctcgctaaggctggagctgactttgttaaggtaggtatcggcggcggttctatctgcatcacccgtgaaaccaagggtatcggccgtggacaggctaccgcgctgattgaagtttgccaggcaagagatgaatactataaggaaaccggtatctatgttccggtatgctctgatggcggtatcgtatacgatcaccacatcaccctggctctggctatgggcgctgacttcgtaatgctgggtcgttacttcgcacgtttcgatgaatccccaaccgaaaagagaactgtcaacggcagcgtagttaaggaatactggggcgaaggttccaaccgtgcaagaaactggggccgttacgacctggatggctccaagaagctggcatttgaagaaggcgttgattcctacgttccatacgctggtccgctgaaggaaaacgtagctaagacctgtgcaaagattaaggctactatgtgcaactgtggcgcactcactattccggaactgcaggaaaaggctgtactcacccttgtttccgcaacctctattgtagaaggcggcgcacacgacgttatcagaaaggaaaaggatggctctgaccgctaa

SEQ ID NO: 2786 - DNA, 2646 bp, unclassified Dialister
atgacagacgaacttggaaagtatgaaccaggtcagattgaacagaaatggtatgactactgggaatctcatggggtattccatgatgaaccggatgatacaaaagaagcatacagcattgtgcttccacctccgaatgtaaccggccagcttcacatgggccatgcgctggacaacacattacaggatattctgatccgctataagagaatgcagggatacaatgtactctggctgccaggtaaggaccatgcaggtattgccacccaggttaaggtagaaagacagattgcggaagaaggtcttaccaagtatgacctgggccgtgaaaagttcctggaacgcgtctgggcatggaaggaaaaatatggcgaccgtatcggtaagcagataagacgtctgggctcttcctgcgactggagccgtgaacgttttaccatggatgatgtctgtgcccgcgcggtacgtgaagttttcgtttccctttatgaaaagggactgatttatcagggaaaccgtatcaccaactggtgcccgcgctgtcagaccgcactgtcggatattgaagttgatcataaggatgaacagggtcatctctggtatttcaattacccgctcgctgatggaagcggatatatccaggtagctacgacccgtcctgaaactatcccgggggatacggccattgcggtaaatccggacgatgaacggtatgcatctctggtaggcaagatggctatacttccggttaacggaagagagattcctattgttgctgatgactatgtagatccagcctatggtaccggctgcgtaaagattaccccggctcatgaccccaacgactttgaagtaggtctccgtcataatctgccggtaatcctgattatgaatactgacggcaccctgaataaggaagctggcaagtatgaaggcatgacccgtgatgaagcacgtaaggcaattatcaaggatttggatgacaagggccttctcgttaaggtggaagaacaggtacatgcagtaggtcattgttcccgttgtaagacgaccgtggaaccaatgactaccaagcagtggttcgtaaagatgaagccgctcgctggtcctgcactggaagctgttaagtccggaaagacaaagttcgttcctgaacgttttaccaacacctatgttcagtggctggaaaacatccatgattggtgcatttcccgtcagctctggtgggggcacagaatccctgtatggtattgcgatgattgcggtgctgtttcagcatcccgtacggacctgaccgaatgcccgcactgccacagcaagaacattcatcaggatccggatgttcttgatacctggttctcttcggcactctggccgttttccaccatgggctggccggaacagactccggtacttaagagatggtatccaaccagtactctggtaactggctatgacatcattttcttctgggtagcccgtatgatgttcatgtccatggaatttatgcatgaagtgccgttcagacacgtatttatccatggtctggttcgcgactctcagggccgtaagatgtccaagtcccttggcaatggcattgatccgctggaagttattgataaatatggtgccgatgcgctgcgcttcactctggtaaccggtaatacaccaggcaatgatatgcgtttctactatgaaaaggtagaaggaaaccgtaactttgccaataagctgtggaatgccactaagtttaccattatgaatctggacgattatgacgaatccttcgttccggacacggcggatcttactctggcagaccgctggattctcgaccgcctcaaccgtaccattgaagatgtaagccggaacctggataagtttgaactgggggcagccgctgataacatttataacttcgcctggaattatttctgtgactggtatattgaactggctaagaaccgtctctatgggccgcacaataaggacagacagggtacacagtatgtacttgttcatacactgacacgcatgctggcacttcttcacccgttcatgccgtttattactgaacatctgtggcagcatctgccgcacaccggtgataatctggcaagatcttcctggcctgttcaggaaaaggaatatgattttgctgtggaagaagaacagatggaacgcattatggatgccatcaaggctatccgcaatatgcgtgcaggttctaatgttgcacctaacagaatgtgccatgttcagattgcctttaccagagatgacctggtatctgcagtaacagaacataaggaatacttcgaaaagctggcgcacgtggaagaaatcaaagtacttgataagaactccgttaagccggaaaatgcagtagcttctgttgtgaccggaatggaagtctacatggaacttaagggtctggtagatgttgaaaaggaaagagcaagagtcctgaaggcacaggaagcacttaataaggatattaagcgctcttccggaaagctgaacaaccagggattcctggctaaggctccagccgctgtagtggaaaaagaaaaggccaagctggctgaaatggaaaaacagatgaaatcattaaatgaacgtctggaattccttgctaaactttaa

SEQ ID NO: 2787 - DNA, 2103 bp, unclassified Dialister
atgccagacaaaaagtcttcacctgattcacaggtgaaatatccgagtctgcccgaacttacattgcgcggcatgctgctgggtatattgattactgcaatttttactgcatccaatgtatatcttggattaaaagtaggtcttactttctcatcctccattccggctgcagtaatttctatggcagtacttcgtttctttaaagattccaatgttcttgaaaacaacatggttcagacacaggcctctgcagcaggtactctttctgctatcatttttatccttccaggcctgctcatgctgggttactggcagggattcccgttctgggaaacactgctgctctgtgcctgtggcggttctatgggtgtcttatttaccattccactccgccgtgccatggtcgtaaacagcgaccttccttatccggaaggccgtgcagctgcagaaattctcaaagtaggcagccagatgcgcaaggacaaggctgagggaaagggtaaatccggaaagtccagtggtatgaaagatattgtaggcggtacattcgtagccgctctcttttcccttctttccaacggcttccatgtagcctcttctgaagtaagccactgggtttcccttggcaggacttccgccactcagctcccgatgggattttccatggcattgcttggtgccggttacctcatcggtattgccagcggcatcgccattttcgtaggtactcttctttcctggggtgtatttgttccatacctgaccagtgtaatgactccggaagccggccaggccgcttctgaatttgcccattccatctgggcttccaaagtccgctttattggtgcaggctgtatcggtaccgcggcggtatggaccttgattaccttgattaaaccggtcattgatggggtaaaaatgtccatcgctgcacttcgcgataacaaaacggctgaagccagagcactccatcatactgatattgacctggatccaaagaccaccggtattatcttcctggtgatccttgttggtctgtttgttgccttttattcttttgcaagcggattcaatctgccgttatctattactttaacctatgtattcaccggaattctggttgcgctgctcatgggcttctttgtagctgctgcctgcggatacatggccggcctgattggtacttccgccagcccgatttccggcataggcatcctgggtattattgtttcatccctggttgttcttggtctcagcaagacctttgaagtattcgatatgccaggcggcgctatgttctccaccgcatttgctatttttattaccagtgttattgtcagcattgccgctatctccaatgataatctgcaggacctgaaaaccggccaactggtaggtgctaccccctggaaacagcaggttgccctcattatcggatctgttgtaggtgcattcgccatcgccccggttctgaacctgctttatcaggcctatggttttaccggtgcacttccccgtcccggcatggatccaacccaggcactgggtgccccgcaggcgaccctgatgactaccatcgcagaaggtatattcagttccactctggactggaattatattatctttggtatttttgtcggtatcgcagccattattacagaccgtctgcttaaacatttctctcacgggaaactggcacttcctccgctggccatcggtatgggtatctacctgccgccaacactggaacttcctctggtcatcggttccgttatgggatatatcattcataagaaactggctgcacgtgccgcggtacgaagcccgggccatgaacaggaagatattgatgaatgtaaccatcatggcgtcctgtttgcttccggcctcatcgtaggcgaaagccttatgggcgttctcatcgccatgctcatcgttctttctgttacctccggtggaagtgaaaatccgctggcactggtaggacctgacttccagccggttgctgactggattggtgctctctgcttcatcggcactatcatttattttatccatcacatttttaagactccgttcactccggaagataatgataaataa

SEQ ID NO: 2788 - DNA, 1905 bp, unclassified Dialister
atggaaataattaaggcccgggtcatgggtttttgctacggcgtaaaaagagctataaaaattgcgacggcggcagcggaaaaaaacggaagcgcggtaacgctggggcctcttattcacaatccgcaggtggtcaaccggctggaaaaagaaggggttcattccgtaaaaagcttaaatgatgtaaaaaataaagaaattgtaattattcgctcgcatggtgtgggtccttcgtgttataatgacattaagtgcaaaaatctgacactggaagacgccacatgtccttttgtaaagcgcaatcaggaaatagcgagagtgctttctcatgaagggcatcagatgatactcatcggcgaaaagaaccaccctgaattaaagagtgtggcagcatgggttgaaggaaagcatcctatcattatagaagatatgagtgatgtggacgcgatgcctcagctggatgaagcgcatattgtaattcagacgactttctctattgcactggcagaacaactgattgccgctatctgcagaaaagtaaaaaaagcagaggtgcacaggacaatctgtcaggcaacttcagaaagacaaaaggcggctcaggagctggcgggaaaagtggatgtgatgattgttataggcggccgcaacagtgccaatacaggcagacttgcggaagtctgccgagcagcaggcgctgtgacacatcatattgaaaccgcgaaggaacttcgcgcagagtggtttcatagccaggataaggttggcataaccgccggtgcatcgacaccggactggatcatagaggaggtattttttattatggaagacatgggtaaaatgctggagatggaggaacagaacctcgattataagaagggcgacgttataaatggtgaagttatcgaactgttcgataacaaagcttacgtttccttcggctataagacagaagctgttctgccgattcatgaatactcttacccggaaccggcatccctgaaggacgttctgaaggttggcgacccaattaaggctgttatcgtaaatgcagtcagagaagacaacccgatttacatttccaagattaagctggacagactggctgaatgggatgacgtagaagcagcatttgaaaagggtgaaccggttgaatgtgaaggtattgaagctattaaggttggccttctcgttcagattaattctctccgcggctttattccgttgtctcagggtgatttgagattcgttcattccctctccaacctggtagggaagaagtttatggctaagattcttgaagttgatcgcgctaagaaccgtctggttctttcccgtaaggcagtactggaatcccagcgtgatgaagaactcaaggttattgaagaagcttacaataacggagataccctgcagggaacagttaagaagattatgccgtacggtgctttcgtaggaatcaacggagttgaaggtctgcttcacatttccgatatttcctggaagaagattggcaaggtagaagacgttctccagccaggccaggttattgatgtgaagattaagtcctatgacccggaaaagcagagaatttccttcactcataaggaatgcattccgaatccatgggaaacatctatccatgaccatgacgttgacgatgtagttgacgctaaggttgttaagattcttgaattcggtgcaattgttgaactggatgacggcctgaccggactgctccacatcaacgaaatgacccgcgatcacaacaagaagccaagcgatatcgtcgctgtaggtgatgtgatcaaggttcgcatcatcggaattgatgaagaccgtagaagaatcagcttctccctcgtagaagcagctgaccatgatgcagcagaagacgctgaataa

SEQ ID NO: 2789 - DNA, 2406 bp, unclassified Dialister
atggatcagagatttacggatggggtaaaaaacgcatggaggtttgctattgccgaagcgcagaaactgggcagtgaatacgtaggggttgaacatctgctcatggggattgccagtgaaaaggatagcgccggcggcaagattcttcattcctttggaattaccccggaaaagattgaacagctgcttggaggagctcataccagcttctttaaccgcgaactgtacattgcgccgcgtacgaagagggtactggaactggcagctgcagaagctaatgaattggggaataactatgtaggtacggagcatcttcttctggctatactgcgtgaaggtgatgggatgaccatgagcattctggaacgtttcggtgtaaccgaagacaaaatgcaaaaggcatttgaaaccgttatgaatgaatccggtaaaggaggagactcagcaacattgggcgatctcagcgattatgcaatcgatcttaacgaacgggctaagcaggggaagattgatccggtcattggcagaaccaatgaaatcaaccgggttattcaaattctgtcccgtcgtaacaagaacaacccggttctgattggtgaaccaggggttggtaagacagccattgcggaaggactggcacagagaattgttgaaaatgacgttcctgaaattcttaagaactgccatattatttctctcaatatgtcctctatggttgccggtaccaagtacagaggtgaatttgaagaacgactgaagaaagtcattgaagaagtgaagaaacatccggaatggattctcttcattgatgaactgcatacgctggtaggggcgggtgcaacagaaggctctatggatgctgccaatattatgaagccggctctggccagaggcgaactccgctgcattggcgctaccacattgaaggaatacaagaagtacattgaaaaggatgccgctttggaacgtcgtttccagccggtaaaggtaggcgagccaaccaacgaagaaaccgtgcagattctgcagggactccgtgataaatatgaagctttccacaaggtaaagattccggatgaagccattaaggaagccgtaagattgtcttcccgctacatcacggaccgtttccagccggataaggccattgacgtaatcgatgaagccgctgccaagattcgcatggaagcttcttccgcgccaaaaggattgaagcagaaggaagatgaactggcgaatatccagaaggaaaaggaagccgctgtttccgcgcagaactttgaaaaggcagccgtctacagagatcaggcaaagaaactttccgatgaaattgaaaatctgaagaaggactggaagggggcggaccaggatcatctggccgttactccagaagacattgccgaagttgtggctaagtggaccggaattccgctgcagaaccttacacagagtgattcggaacgtctgcttcacctggaagatgaactccataagagagtggttggccaggaagaagctgtacatgcagtggctaaggctatccgccgtgcaagagccggcatgaaggatccacatcgtccgattggttcctttatgttcctcggtactaccggtgtaggtaagaccgaactggcaaaggcactggctgaatgtatgtttggcagtgaaaaggcactgattcgtttcgatatgtcggaattcatggagaaacacgaagtgtcccgtctcgtcggagcacctccaggatatgttggttatgatgaaggcggtcagctgacagacgctgttcgtaagaatccatattctgtcattctgtttgatgaagtggaaaaggcacatgccgatttctttaatatccttctccaggtactggatgatggccgtcttaccgatggtcagggccgtacggtagactttaccaatacggttatcatcatgaccagtaatcttggttctactcttctgagagaacataccaagagcatgggcttcacagcagaacacaaggacggggaaaccactgactttgaagaaatcaaggggaagattatggatacggttaagagaacattccgtccggaatttatcaaccgtattgatgaaatcattgtcttccatccactgaccgaagacgatctgaagaagattgtaagactgcttatggtcaaagtggaaaagaagatggattccatgcatgtggctcttaaggtttctgataaagcctttgaacagattatcaaggatgggaccgatgtggagtatggtgcaagaccactcagaagaactattcagcgcgaagtggaagatgctatcgctgaactgattcttgaaggcaccctgaagggcaagaacacactgcacattgatgtggacgacaaaggtaaactggtatttacagccgactaa

SEQ ID NO: 2790 - DNA, 2124 bp, unclassified Dialister
atggaagaactttgcgggacagtagagcgtatcgtatatacaagtccggatggcacattctgtgtcttgcggatgagagaaaaagacagcggtaaacaggtgactgttactggctctatgggagtgccttcgcagggggaatccatcattgtacgggggtgctggacacggcacccccgttttggtgtgcagtttaaagggcagtccatggaagtgtctaaaccggaaacctctgatgaaatcgaaaattatctggcatccggcgttatagaggggattggtccggcgatggcaggccgtattgtggcccatttcggaaaagataccctccatatcatggatgaaaacatagacgcgcttctggaagtgccgggcatcggggagaagacattgcagaagattgccgcctcttatgaagaagtgaaatcaacaggcgaactgattatgctgctccagaaagcaggaatctcgcctcatatagctatggaaatgcagaagctgtatggggaagacgcggaagaggttatccggaacaatccctatcgcatgcttggtgaaattcccggattgggctttcgtgatgtggacaggctggcactggctaacggtacggaaagagaagatgaggaacgtattattcatggcatgttctatattctgtcacgctatgccgtacagggacattgctgtgccccggaaagggctgtatgctatgaggcctcacggatgctgggactggatgaggaggtgcttcgccataccgcagcagaagcgataagtaccggcgaaatcccatcctgccagtttgaagacatggttttcctttatcagccctctctctatgaagcggaaacagagtcagtttaccggatcagagaacttctggagaccacagcggaaggttcggcgacactggctattgaaaagtttgaaaagaaaaaacatataacgctggcgccggaacaggtgcaggccgtagaagccgctatgaattcgggaatgctgattattaccgggggaccaggtacagggaagacaacgcttattcaggcgattattacggctgcggaacaggaaaacagagaagtacgtcttatggcacctactggaagagcagccaagcgactggctatagtgaccggaagaaatgctgataccatccataaggcactggaagcggaattatcggatacatccaacctgttcaataaaaatgaggcggatccgctggatgaagatttaatcattgtagatgaagcgtctatgattgatatgtcattgttttatcatctcataagcgccataaagccaggggcctccctggtactggtcggggatatagatcagcttcctccggtagggccgggggctccgctgaaggatctgattgcctggggagaggttccggttatccgtctccagcatatattccgtcagggcgaaggcagcggtattatcatcaatgcttctcgtgtgcgggagggacaggttccgcagtctgatgagaatggagagttcgtgttcagaaaggtatcctcagagcaggaagcctttcagcaggtgatggagctgtgcagggactgccattatgagtacgatcagaataagctgaccatgcaggtactttctccaatgtacaaaggcatctgcggtgtggatcatctgaatgaggctattcagatggcagtgcatggatccaatgagaaaatcaccggatttctacctggggataaggtaatgcaacgccggaatgattatgaaaaaggcgtatataatggggatattggtgtagtgtgggccgttacggatggaaaaatcagcgtatcttatgatgataaagaagttacttatgaaaaagaggaacggcgggatcttcagcttgcctatgccataacggtgcacaagagccaggggtgtgaatatgatacagtcgttatggttcttttaccgactcagtatgtcatgctgcagagaaatctgctgtatacaggaattaccagagccagtggcagaaccatactgataagtacggatgaagcgatagctaaagcggtagctactcataagatggcagggcgatgcagtctgtttttgccattgcttaaaggagaggccttatgctga

SEQ ID NO: 2791 - DNA, 1965 bp, unclassified Dialister
atgtctcaaaaaggaaaatattatattactacccctatttattacccgagtgccaaactccatatcggtcatacttattgcaccactatcgcggacagcgaagcccgttttcacagactggatggagatgaagtgttctttctgactggttcggatgaacatggccagaagattgagcagaaggcagaagcagaaggagttactcctcttgaatacacaacccgtattgtctccatgttcaaggagctgtggaaggaactgaatatatccaacgatgactttatccgtaccaccgaagaacgtcataagaaggtcgttcaggcgttgttccagcgtgcttatgataaaggagacatttatcttggcaagtatgaaggctggtactgtattcctgatgaaacgttctggccggaaaataaactgacggaagaacatgtttgcccggattgcggacgtccgctgcagagagtcagtgaagaagcctatttcttcaagatgtctaaatatgcggatcgctggcttaagtttatagaagaaaatccaggattcattcagccggaaagtcgccgtaatgaaatgattcagtttgtaaagagcggactggacgatctgtgtgtatccagaaccagcttcacctgggggattcctgtgccatttgatcccaagcatgtagtatatgtatggttcgatgcactggttaattaccttacggcagccggtattatggatgataaggaaaagtttgaaaaattctggccggcagatgtacatctggtagggaaggaaattgtccgtttccataccatcatctggccgattatgcttatgagccttggtattgaactgccaaaaatggtatatggccatggctggctgattgtggatggggaaaagatgtccaagtccagaggtaatgtcatcgatccaattccgcttctccgcgaattcggatcggatgccattcgttattatctgcttaatgatatccagttgggacaggatggtaatttcagcagagaaagacttatcaaccgcattaattccgatttgtccaacgatcttggcaatctgctctaccgtaccctttccatggttgaaaagtatgaaggtggagtactaaacaagggagatgcttctgtagatgacaaggtggatgccgcatgccgtgaagtggaaaagggagcagaagatacccttaaggcattcaaggaaggaatgaccaactggaaaatcaacgatgctctccgcgcagtctgggcttatatccgctccctcaataagttcatcgatgtgacagaaccatggattcttgctaaggatgaagctaaggccccggcacttcaggctgtactttatcatatctgtgaaggtctgcgttttgttgccctcatggcagaacctgtaattccgattggtgctgaaaaaatctggaaccagctgggcctcaccggatttgctgatgcaggctatgctgaccttacctggggaggaattccagacggtaccatagttcataaggaagcgccgatttatccgcgcattgacctggaagaagaagcgaagaaggcagcagctattgaagctaagataaaggaagaagaagcagctaaggcacctgaagttaatccagccattgaaccggttaagccggaaattacctttgatgattttggtaagattgaccttcgtgtggctaagattctcacggcagaaaaggtaaagaagtccagaaagctgatcaagatgacggtttctcttggaaatgaggaaagaacagtggtcagcggtatcgcagaacattataaaccggaagaactgattggcaaacaggtgatttttgtggccaaccttaaaccagccaaactgatgggtattgaatcccaggggatgattctcgctgcttcactggatggcaaactggttgtaccaaccgtagatatgccggcaggaagccgggttaagtaa

SEQ ID NO: 2792 - DNA, 1818 bp, unclassified Dialister
atgattagagaagatatcagaaatatcgctatcattgcccatgtagaccatggtaagaccacattggttgatgcaatgcttaaacagagccatattttccgtgaaaaccagaaggttgctgaacgagtaatggactccaatccacttgaacgtgaaagaggaattaccattctggcaaagaatacttccgttatgcataatggggtaaagattaacattgttgataccccagggcatgctgattttggcggagaagtagaacgaattctgaacatggttgatggcgttctgcttctggttgactctcatgaaggcccaatgccgcagactaagtatgtattacgcaaggcactggaacatcatctgaagcctattgtagttattaacaagattgaccgcccggatcagcgtgtcagcgatgtagaaggtgaaatcctcgacctgttcattgaactggaagctgatgatgaccagctggacttcccgcttatttatgcatctgcaagagatggtattgccaagtacagcatggatgatgacagcaaggatctgacccctctgtttgaaaccattattaaatactgcccggctccggaaggagacgacaaggcaccattccagtgcattgttaccacactggatgctgatgaatatctgggcaaggtagccattggacgtatcaccagaggcacagcccgccagggtatgccggtatgcattactgatggagaaaagaccagaaaagactatctcggctctctctttacgtgggtcggtatgaagcgtactccggtacaggaagctaagatgggcgatattattgctatggccggcttcaagaatatcaccattggtgaaaccgtaactgacgtagatcacccagatgcacttccacgcattaagattgatgaaccgactctgtccatgattttccgcgtaaataagagtccttttgctggccaggaaggcgatttcgtaaccagccgtcatatccgtgcccgtctgcataaggaaattgaaacgaatgtagcacttcgcgtagaagatacggatacttccgatgcatttaaggtttccggccgtggtgaacttcacctgtccgtactgattgaaatgatgcgccgtgaaggtttcgaactggaaatttccaagccgcatgtaatttataaggaaattgatggcaagaagtgcgaaccaattgaacatcttaccgttgaagttccgcaggaatacatgggcgccgttatggaaggtcttggaccgagacgtgcggaaatggtttccatgaatgaactggctggctacatgcgtatggaattctctattccggcccgtggccttatcggtttcagaaatgaactgcttaccaccactcgcggtacaggcattatgtatcatgtatttgaaggttatgctccatacaagggcgatatcccgggacgtacacgtggttccctggttgcttttgaaaatggtacaactaccgcttatggtctgaactctgttcttgaccgtggcgaactcttcatcgaaccgggcacagaagtatatgaaggtatgattatcggggaaaattcccgtgaaaacgatatggatgtaaatccatgcaagaagaagcacctgaccaatacccgtgccgcagcttccgatgaagctatcagacttccaccatgccgtaagttcacactggaaggtgcactggaatggatcaatgatgatgaactggtagaagttacaccaaagagcatccgtatgcgtaaggcagttatttccagacaggaaagatataagactgcaaacaagaaaaagaacaagtaa

SEQ ID NO: 2793 - DNA, 2469 bp, unclassified Dialister
atgaatgtttcattaaagtggctcggtacacttgtagatattaaaggtctcaaaccggaagacatggcagaggttctgacatgcgacggaattccggtagaacatgttattcacccggcacctggcattaaaggcgtagtaaccggtaagattctcaaagtggaaaagcatccggatgcagcgcatcttttggtatgccagctggacgtggggcaggatgaaccagtacagattatcaccagtgcagataatgtaaaggctggacagattgttccggccgctttaccgggggctcatcttccggctaaacatgatcataatgcaccaggcggaatcaaggttggcgatgtaaagattaagaagggcaagctgagaggtctgccgtctgcgggtatgatgtgctctgcctctgaaatgcttcttgactataatctgtatccaggtactgaaccggaagggattatgatccttccggccaatacaccggtaggggtggatttccaccatgtattcgacctggatgatgtaatctttgaaatggaacttactccaaatcgtgcagattgcttcagcatggtcggcatggcactggaaacaggagctattttcaatcgtaaggtcactctccctgaggtaaaagtaaaggaagaaggcccatcgattaatgggcgcgcttctattcacattgcagaaccggaatactgcagccgtttctgcagccgcctgctggaaaatgttaagattggacgttctccggaatggattgaaagccgtctgagaagcaataatatccgaccaatcaacaatattgtggatgctgccaactatgtaatgctggaaatgggacagccaatgcatacttatgattatgataagattgccggccactcccttacccttcgccatgcaaaggatggagaagtacttgtaactctggatggagaaaagcgtacgctgacttctgctgatctggttattgctgatgaaaagggtgcagtaggactggcaggggtaatgggtggcctgaattctgaaatcacagaatctaccaccagcgtactgctggaatccgctgtatttgacagcgcttccatccgccgtacatcccgccgccttggtctgcgcagtgaagcttccggccgttatgaaaaggggattaacgctaagcgctcagcagaagccctcaatcgtatctgccagatcctggaagaacagggcgcatgcacagtagccgctgatatgctggatgaatatccgaatccgaagccggaacaggtaattcatacctctttcgatgccatcaatgattacatcggaattcatcttccggatgaacagattactgatatcctgaccagactgcacttcaaggtagaaaataacaatcgtgaaattgcagtaacggttccggaattccgtctggatgtagaaggtcgtcatgatctggcagaagaagtagcccgtgtttacggctatgccaacattccgattaccactccatggagtgccatcgcggaaggcgaaatgagccaggaacaggaagcatttatacttatcgaagatacgctgatcaacagcggcctgtcccaggtactcaattacagctttatgcataaggatgatttgaagagactgaattatccggaaacacataaggtgtttaatgcgattccgattatgaatcctatctctgaagaatacccggatctgcgcaccacactgatgccaggcctgattcatacactgaaatataatctggcacagaagaacagtgaagtttccatttttgaaatcggacgggtatattatccaaaggctctgccgctgactgaacttcctgtggaagataaccgtgtaagcgcgcttctctccggtactgtcagtgaagaaggctatccgaacgatcaccgtccgtatgatttctttgatatcaagggcattgttgaaaatgttctggctaagctgggtattaccgattacgacattcagagaagtgtttgcccggtattccatcctggcgtttctgctgattttgttaaggacggcaaggtactggtttcctttggcgaactgcatccggcggtacttgataactttgatattaagcagaaagtctatggattcagcatgtctctttcagaactgaatgactatatttccggtgaagtggcattccagcctattccgaagttcccggcatctgcccgcgatctggctattctggttcctgaagaactgtctgatgccgacgtggaagctatcattaccaagcgcggcggtaagcatctggaatccctcacactgtttgacctctatcagggcaagcaggttccggaaggatacaagagcatggcttattccctcgcattccgcgctccggaccgcacattgactgactccgatgtggatacatggattaagaagattgtggatgatctggaaaagaacggctgcaaactgagagaatga

SEQ ID NO: 2794 - DNA, 1596 bp, unclassified Dialister
ttgaagttaacgaaaaataatcgcttatggattatcattttcctggtaagctttctgtttctcctctggggaaatcaatatcttcccgtcaccgacccggtagaatccaattatgcgcttactgccaaagaaatggcagaatcaggaaactggctctcccctactatttacggacattactggtatgataagcccattatgatttactggcttaccgccgcctcttaccgtctgttcggctttaccagcctggcttcccgcctgccttccgtgctggccggagccctgtccgccgccttactgggtgcctatacccagcgtcttctccataaccagaaagcggccgtctgtgccagtcttttcctggtcacttcgctggaattctggattgtctcccatgctatcattaccgatcagcttcttttccttttcaccattcccaccatgctgtccgctttcatagggctgaatgagaacagccggaaacatatggtgattgcctatgcagcggccgctctggcctgccttaccaaaggaccggtcggcctggtactccccgggttgctgctgcttctctggtgcgcctccatgcgctcatggaaaatggtcaggcgatgcttcccctggcaaggaatcctctgttttctccttatcgccacaccatggtatggtgccatgatttattatcacggaactgattttatcagtcagttcctgggactgcacaatgtagtccgtgctacctcctcagaacatccggaagacaatcactggtattattatctggtcctccttccggtatcccttctcccatggaccgggctttccttcctgcagatgaaaacattccgccggcaggctctgtaccagccactgtaccgatttctcatgatatggtgctggggtaccattggtttctataccctgatggccactaaatacgtaacctacacctatatcgctgtcattcctgccatacttctggccgcaaccgccattccgcagtcgtcagaaacgcgtaaattccactgtctgctcttattacctgccctgttcatggttatagccttaagcggtggaaccctggccttaaaaggcaccagctggactcctttttacattctggcactgctttccatcagtctttgcgtatacagtttcagaaatacgaaaaagctgatcttatccatcagcctcagtatatccgcactgtatatctgtctggtttccaccggcctcggcccttatctttccacccgctcaggtatcctgatggctcagtcattccacagcctgcctggctatcacctgtttttctcctcctatagtgcttcctatacgtactatacaggagagacggccatccgactggtaccttctgtggcggatgcggagaaacgaaatcctctgtggaatgaaaaatataccatgccttcccttccggatacccatctggagtcactgaccggagacaaaccggtttacctttatgtttccagaagcaatttgaagctgtttgaccgctggaacatgcgcagggattttatccctgtggaaaccttcccttccggttcaatttatcagtataaaaaatga

SEQ ID NO: 2795 - DNA, 1863 bp, unclassified Dialister
atgtctaaagttattggtattgaccttggtactacaaactctgtagttgcggttatggaaggcggggaacctgtagttattccgaatgcggaaggttccagacttactccttctgtagtaggtttctcaaagactggtgaaattctggttggccagttggcaaagcgtcaggcggtttccaacccgaaccgtaccgttgtatccattaagcgtcatatgggtagcgactataaggtaaatattgatggaaagagctataccccgcaggaaatttccgctatgattcttcagaagctgaaaacagatgcagaagcatatctgggagaaaaggtaacagaagcggttattacctgcccggcttattttaccgacagtcagcgtcaggcaactaaggatgccggccgtatcgctggtttgaatgtactgcgtatcatcaatgaaccaaccgcatccgcgctggcttatggtctggacaagctgggtgaaggtgaacaccgtgtactggtatatgacctgggcggtggtacattcgatgtatctatcctgaatcttgcagatggtgtattcgaagtagaagcatccaatggtaacggtcatctgggtggcgatgatttcgatgcccgcgttatggactggattgcggatactttcaagaagcagaatggttttgaacttaagagagatccaatgaccaatcagcgtctgaaggaagctgcagaaaaagctaagattgaactttccggcgttttgaacaccgaaatcaacctgccattcattactatggattctaatggtgcaccggttcattttgatgctacattgtcccgtgcagaatttgaccgcattactgcagatctggtacaggcaaccattgatccaatcgacattgctatgcgcgatgcaggcgtaaccaataatgatattgaaaagattctgctggttggcggttcttcccgtatcccggcagttcagaatctgattaagaataaatttggcaaggaaccaaataagggaattaacccggatgaatccgttgccgtaggtgcagctattcaggcaggtgtacttaagggtgaagttaaggatgtccttctgctggatgtaactccgctgtctctggggattgaaaccctgggcggtgtattcacaaccatgattaagagaaatacaaccattccgacatccaagtctcagattttctccactgcagcagataatcagccatctgttgatatccatgtactgcagggtgaacgtccaatggctgcagataacaaaacccttggccgtttcgaactttctgatattccgccggcaccaagaggagttccacagattcaggtaactttcgatattgatgctaacggcattgtacatgtatctgctaaggatctgggcacaggcaaggaacagaagattgatatcaagtcttcttccggactttctgatgaagaaatcaagagaatgcaggatgatgctaaggctcatgaagaggaagataagaagcgcaaggaagccattatggctaagaataatgcagaagcactgatttatcaggctgaaaagaccattaaggaccttggcgataaggccgatccggcaaaggttaaggaagttaacgatgcagtagctaagcttaaggaaaccatgaagagcgatgatacagaaaagattaaggccgatgcagatgcactgaccaagccgcttcatgaactgactgaaaagctgtaccagcaggcacagcaggcacagcaggctcaggcacagcagcagggacaggcacagagccagcagaacgctaagaatggtaaagatgatgtcgtagatgcagactacaaggttgttgacgacgacaagaagtaa

SEQ ID NO: 2796 - DNA, 2343 bp, unclassified Dialister
atggacgtgtctatcaaaagaacaattaccattggaacaaagaaaaagagccgaaccagaaaagcaaaagtagcagatccggtttttaaaaggaaaccgactgcaggtggaaaacatctggtcgtcgtggaatctccggcaaaggctaagactatagaaaaaattctcggatcgaattataaggtgctggcctctatggggcaccttcgggatttaccggccagctcactgggggtagatattgaaaatcagtttaaaccggaatatgtaaattccaaagataaggcggatgttattcatgctttgcagaaggaagccaacaagtgttccgatgtcatgctggcaacggaccctgatcgtgaaggggaggcaatttcctggcacttatccaaactgctggatgtgaatccggaggataatgtccgtattgcctttcatgaaattacgccgccggctattaaggaagccatcaagcatccaggaccggtagatatgcacagggtggatgcacaacaggcaaggcgtgtgctggaccgtctggtaggctataagctgtctccctggctgtggaggcagttgtataaaggactttctgccggtcgtgtgcagtccgtggctgtgcggattatctgtgaacgagaacaggaaatacgtgcttttgttcctgaagaatactggtttgtaaatgcaaaattcaagacgctgaagggcgaagtgttctctgcccagtatctggatgataaggggaagcaggctcgtcttgccaacaaggaggaagcggatgcagcgctggctctcattcaggggaaagaggcagaagttgtttctgttaccaagagaaaacagcagagaagggcacgtgctccttatactacatccacgatgcagcaggatgcagtaaaccgtttgggcttcagctcaaagaagactatgatgctggcacagatgctgtatgaaggtattgaactggctggtcatggacatgttgggcttatcacctatatgcgtacagattccacacgtatttcccaggaaatgataaagcaggtccttccatacattgagagtgtttacggaaaggaatatgtaccggaaacgccgaatatttatcataaggccaaagatgctcaggatgcccatgaagctattcgcccgacatcgcttgcattttctccggatgtggtggcttcttcgctgagcagagatcagcttaaactgtacacattgatctggaaccgctttattgccagccagatggcaccacagattcttcagaatactacagcggtactgtcctgtggggatgcccggctgcgcgccagtggatctcatgtggtttttgatgggtttaccaccgttatgaaagccgcatcccgtaaaaaggcagaaggggaaactgaaaaatatctgccaccgctggaaaagggggaaaccgtatttcctatatccagtgaaggggaacagcactttaccacacctccgccaagattcacggaagccagcctaatcaagacgctggaagaaaaggggattggccgtccttctacctatgcagctattctggatgctatccagagaagaaagtatgtggaaaaggatgggaagcagtttattccgacagaaattggattcaaggtaactgaacttctgaagaaatactttggccgtattgtggatatcggctttactgcagatatggaacaatggctggataagattgcggaaggtgatgctacataccttcaggtactcaccgacttctacggtattttcagcaaagagctggaagaagctgatgcgcatgcggaagaagaacggaagaacaatgaagaggtgtctgaccaggtatgtgaaaagtgcggttcacctatgattattaagtttggtcgttttgggaaatatctggcctgctctaattatccggcatgccataataccaaatcacttaatgtgaacaatcagccggaagagaaatcggataagccgtgtgaaaaatgcggggcacttatggtgtacaagaatggaccgtatggacggtatctccattgtccggaatgcggaaccaacaaatccattgttattgacacgggaattacctgtccgaaatgtggaaagggacatctggtaaagagaaaatcccgcagaggacgttatttctatggctgcagcacctaccccgcatgtgatatggcgctttggaatgagccggtggataaattctgcccggtttgcggccatattatggtaaaacgagtatataagaacgggacggaaaaagttttctgttccaatcaggaatgtacagaatatccaagaagaaagacaaagaaagccagtgaataa

SEQ ID NO: 2797 - DNA, 1542 bp, unclassified Dialister
atgactatcaaaagagcattaatcagtgtttctgataaaacgggtgttgtggaatttgcaaagggacttcatgaactgggcgtagaaatcgtttctaccggaggtactctgaagactatcgcagcagccggcattccggtcattccggtatctgaggtgacaggtttcccggaaatgatggatggacgtgtcaagacactgcacccgaagattcatggcggcattctggctatccgtgacaatccggaacatgtaaaggctatgaaggaacatggaatcacgggtattgatctggtggcagtcaatctgtatccattccgtgaaaccattgcccgtccggatgtaactctggcagaagctatcgagaatattgatataggcggcccgtccatggttcgcgctgcagcaaagaactataagtatgtaactatagtagtggatccaaaacagtatgatgaaattctggaaaggattaagacagatacccttacggaagaattccgtcttgacctttcccgcaaggcgttccttcataccggattatatgactgtgccattgccgattatctgacccgtcaggtaactggggatgaaggacagatgcctgacgtatactgcaaggcgtataccaaactgcaggatctccgttacggtgaaaatccgcatcagaaggcagccttctacagagatccggaagctaagggcggtattgcctttgcccgtcagctgcatggcaaggctttgtcctacaataacattgtggacatggaagcggcatggaatctggctcacgaatggtccgaccgtccgtcctgcgtcattgtaaagcacaccaacccatgtggaactgccctgggagatactccgctggaagcgttccagcgtgcatttgaagccgacagcaaatctgcttttggcggcatcgtggcattcaaccgggaactggacggagaaacagcagccgctatgaagccgattttctttgaagtggttatggctccgaagatttctcaggaagcactggatattctgggaacaaagaagaatatccgccttatggaagtgccggaagttgaaacagaagaactccagctgcgcaaggtatctggcggacttctggttcagacccctgatgatagcagtgaaaccagagcggactgcaaggtagttactgaccgtgcaccgactgaagaagaatggcaggctatggaatttgcatggaaggtagtaaagcatgtgaagtccaatgccattgtcctcactggtaaggatgtaacttatggtattggcgctggacagatgaatcgtgttggctctgccgatattgccatcgcagaagctggtgataagtgcaagggagcagcgctggcttccgatgccttcttcccgttcggtgatacggtggaagctgccggtaaggcaggtattacctgtgtaattcagccaggtggatccatccgcgatcaggaatccatcgatatggctaataagtatggcattaccatggtatttacgggacacagacatttccgtcactgctga

SEQ ID NO: 2798 - DNA, 1899 bp, unclassified Dialister
atggctgacgagttactctattacattcctgctggacagtatggaaaagagggggttttatccctccttgcacagcatcctgagattaaatttgtatctgttgtaggtatcgatctggccggcaatgatacagatgaaaagattccgattcgtattttcaaggaaaactatgatgatttctttgctggcagagccgtacagaccgatggctcctcggtagtgcttatgaacattgccacactcaatgatgccagagtggatatggtaactgacagcagcgtaaactggtacattgattataattatgaaaacctggatgaagaaacaggactgccgactggtactctccgtattcctgcattccttcttcacaatgacagattcgtggattccagagctattcttaaaaaatcatgtgactatgtagcggctgaacttaagaagctgctcactacccatccggtaaagggaatggaaaatgtaccattccatgaaatccaggatattatatttaccacaggtactgaactggaattctgggtaaagacaccaagtgaaaaacattctgttccgaatctttccatttctcagaagttacaggaacagtattggcagagaatgcgcggtaatgttcgtacagccatggaacagaccgtagatgctctcgaaaaacgtggaatgctcgttgaaatggggcataaggaagttggcggaattaagccgcatgtagatgacaatggacatattgtagacgtagcagaacagctggaacttgactggagattcagtgataacccgctgcaggctggtgataatgaactggaagcccgcattgtggttcgtgaaattttccgtaagaatggtcttgatgtttccttccgcgctaagccgattatcggcgttgcggggagtggtgaacatacccatgtaggtatagtagcccgtcttaagaacggcaagacaatcaatctgttggcaccggaagatatgaaggcggatttcctgtccaccatcggttatgggtttattatggggattctgaagaattatgaagcaaccaacccatttgtttcctctaccacggatgcatttaaccgtctgaagccaggctttgaagctcccgtatgtatcgtaacctctctgggtcacactccggatgttccatccagaaacagaaccatcctgattggtctgattcgcgatattgataatccgaaggctactcgctttgaactcagagcgcccaatccgttcaccaacacctatctggcagcttcctgcctgtatctcaccgcactggacggaatccgttatgcgataacctccggtaagaccccggctgaacttctggctgaactctccaagaagccggaagataaagcagattacctggaagaaggcagagcttatcgttgtgaagaaaatgtattcgaagactttacagatgaagaacgtgatgctgaattcggtaaaccgccggcaactgtctgggaaaacgtcaagattatgcgtgctaacccggataaggttaaggtgctgactgcaggggataccctgactgcggatatcgttgactccttcgtagcttctatcctttatcgctggtccaatgaactggaagaccgcatcattccggcagtagaggcaaaactccgcctcttcaagcatcttgaagatgatgacgatctggacaagaagcgttggaaagctatcaaggctgtccgtatcgaactgggtaaggacaaggaaggcaagaagtccatctgcacccgactgaaggatgcactggaagccagagattatgacacagcttctgcgctccagctggaaatgacaagaaagattgaagcattggaagttgcttacagagaatacagaaataatattctggatgactaa

SEQ ID NO: 2799 - DNA, 2022 bp, unclassified Dialister
atgattacaggttacaagaaagctttgctcacaacagctgttgttatggctgtttctgggtttaacgtctatgcagccccggatattgcgaatagcaatatgtctcagagtgaaatgtacaatgttacccagggaaaaacagaggatcaggcagacgatattgatgtgtctgctgcgacatctgacagcagcaagacaacgactctgcaggcttccggtgataatgatcagtctggggtggatatcagcaatacggcacaggcttccctggcagatacagcatccatgtatctggctccggatgatgacaaggccattgcgaaggcagcaggtaagactatcacttccattgactttgatggaattccggaagaagttaaggccaagctggttccccttcttacggaaaaaaccggtgacaaggtctctgtaggaggcgtacgcaatgatgtggctgcattgggcggaaccggggtattctcccagatttctccacagtttggagcggttaaggaaggggtaaccctcacattccgtatggtttctaacccggttatccataaagtcacttttgaaggaaatacggttttctctgatgatgaactgagacagattctggctgttcccaaggacagtgtactgaatttcgttcaggtatccagaaacatcaaagctattgatgatctatatgtacagcagggctatattctggcatctattccggatgtaaccgtaactgaaaacggaacccttaaggtgaatattgcagaaggtaagatagaagatattcagattgccggaaatgaaaagaccaaggataaggttattcttcgtgaactgcgcttcaagaagggggaaccgtttaataagttcctggcaagccgcagtatggaacgactttacaacctcggaatttttgaggatgtcaatatgaagcttcttccgggaaacgaaaatcatgacgttatcattgaaattgatgtagtagaacagaagacaggcgtagttactgtaggtgccgggtactctgaatccgacggcatggtaggtattcttggcctgactgaaaacaatttccggggaaccggtgacaaggtcaacttccgctgggaattcggtggttcttctcatggcaagaactatgaaatctcctatacccatccatacatcaatgacaacggagatgcactgggctttaccgtatttgatcgtcgttataagtatgatgactatgattccaatggtgacaccattgcagaatatgataagagaaagaaaggctttggcgtttcctgggctcatgtgaatggtgaataccggaccaacaaattttatctttccacaaccaaggaatcctatgatgatgaagacgggtttgatccgggcagcgtaatggaaaaatacatgagagagaacggtataaccgattaccgcgatagtgattggtacaagaagattatggataacttcggacgtaccaacagcttcacctttacccatgtatttgataaccgtgataattatttcaatgcgaccaagggtcgtcgcctctccttcactaccgaatggggtggacatggacttggcggtgactatgattactacaagttcacagcagaaggccgtttctataaagctttaggcaacggtcatgttctggcacttcgtctgatgggcggctatattgatggggatatttcctacaacaacctgtttgatctcggtggcgcagattctctccgcggctacgaagatgatcagttcaagggccgcaagatgtatgaagcaacccttgaataccgaatcccggttgctaagaaggtagaagccgttctgtttaccgatgtgggcagtgcctgggatgttcaggaaggcaagatgccatggtatcaggatgatgattccatccatgcagcagttggtgtgggattgcgtgtacagacacctcttggaccaatcagactggattacggtcatggggatcaaaacaagttccacttcagttttggaacacagttctga

SEQ ID NO: 2800 - DNA, 1671 bp, unclassified Dialister
atttttatggaaatcagggaaaagctgaaacaaatcattgaagaagcacaaaaagccgcaatcgcagcaggtgaattgccggaaggcgaatatgctcctgtacagcgtctggaaataccgaaggaaaagaagttcggtgattattccaccaatgctgctatgcagtgggcgagaaccgcacatcgcgctccgagaatgattgctgaagtactggttaaacatattgaatccgacctgatagatcatatggaaatcgcaggggcaggattcatcaatttctacctcaccaatgacctggtatacagcgaactgcgtcagattctggcagcaggtaaggattatggcaatcttccaaacaagggaaatggcctgattaatctggaatatgtatccgctaacccgactggcccgcttcacatcggtcatgcccgcggggccgcatggggttccgcactggccaacctgtaccgcgcagccggctataacattactactgaatactatatcaacgatgcaggcaaccagatcgaccatctggctgaatccgtaaatgcccgttatctccagctctttgggatggatgcagaaattccggaagacggctatcatggtctcgatattgtagatactgcaaaggcaatcaaggaaaaggatggccgcaagtatctggatatggatgaaaaagacagactggctgccttcaagattattgccctgaaggaaaagctggatgtcatcaagaaggatcttggcgacctgcgcgtaacctttgatacctggtacagcgaaaaatccctgtatccggacaaggtacacgaagcactggaaccgatgaagaaatccggtgccctctatgaaaaggatggcgcatggtggatggccactaccaaggaaggggacgacaaggaccgtgtagttatccgttctaatggcgttccgacctatttctgctctgatattgcttaccacaaggataagttcaagagaggggctaagaaacttatcgatatctggggtgctgaccaccacggatatgtagcccgtcttaagattgctcttaagctccagggattcaacccggatgatttccaggttcttctcctccagatggttaccctgctccgcgatggggttccggtcaagatgagtaagagaaccggtacggctatcaccatgagagaacttatggatgaagtcggcgtagatgctacccgttatttcttctgcagccgtactctggacagccagatggaatttgatatcgacctggctaagaagcactccagtgataacccggtatattacattcagtatgccaatgcccgtatccgcagcctgttctctcaggcgcaggaagccaaggtggcttatggtgactgggcacataccgatttcaccgtactgactgatccgagtgaaatggatcttatcaagaagctggaagcttatcatggcatgctggaatcggcagccagagaacaggctccgcagcgtgtaacccgttatgcattcgaactgggtaccctgttccatcacttctacaagaagtgccgtattctcggcgtggaagaaaagctgaccgtagcccgtcttggactgattacagcggtacagaacgtacttgttcatgctcttggtattcttggtgtatctgcacctgaacatatgtaa

SEQ ID NO: 2801 - DNA, 4461 bp, Coprococcus catus
atgccgcatattaacagagtgcgtgtcaataatgtacgctataatttcggtacacagttttatgatgattttattatgcgctttgactgtaaaaatgtgctgtatgacctggccaacggcggcggcaaaagtgttcttttactgcttttgcttcagaatctgattccgaactgtacgctggatgacaagcagccggtggaaaaattatttcgcggtgaaggcggcagtacggtcatccattcattaatcgaatggaagctggacgattatcttgtcaaagatgattacagatatatgttgacgggattctgcgccagaaaggcaaaagatgatgaaaatcaaaatgcagcaggggacgcagcggcgattgaatattttaactatgtcattttttacagacattacaatgacaatgatatcgtgaatcttccgctcagcgacggtaaggaaagaattacatggccggggcttaaaaattacctcagaaatctttcaagaaaggattaccaactgcaggttcatttattcgagcgcaaaggtgaataccagcgttttatcagccggtatggactgtatgagagcgagtgggaaattatccgtgggatcaataagacggaaggccatgtgcggacctattttgaaagtcattatcggacaacccgcaaggtggtggaggatcttctgatcgaggagattatccagaaagcatttatggcgcggacatcggaacgggctgaaaatggtgataatatgtcgttgatggcggatacgttgtatcagatcaaagatcagttagcggagctgacccgcaagaaagcggaaatcggccagtatgatagacagcaggaagttatgcacagcctgggtgagcgaatccggacgctggatgttatgtatggtgaggaaatgacactgcggatggacattgccagagcatggcagactgtacttgccagacagaaaaacaggactgcggatctggcagcggccagaagagaacaggagctggcaaaggggcatatggaagactatgccagaaagctggagacagtcaaaatccagtccagcaaggaacagctggcctatcttgagaaggaagcggccgactgcagcgaaaagcttgagaagttacagttggaacaggctgtcagcagggatgatctgaacctcagagagagtatgaatgattacctggaatatctggaagaacagcagaaatatcaggccgtggagaatacgatccgtcatagtacggatgggcagaaggagcagctggcacagcttcgggcttatgcaaaggcatggcagaaacgttgccagaagcggatgactgttttggatgaccgtattgtacaaggccggaaagaaatggaaaatcttcagcaaaagctggatgaactggtagcatcagagcgtgaagatgacagaatgctggcggttctggagcatcagtcccaggaaaaccgtgaaaaagagcaaatgtatctgaaggattttgcaaggctgagggaagcatcaggacttctggtgattgaggaagtcgataaggaactgctcagccagaaaaagaaactggaagcaaaggaagctgagctgatgcagctcatggaggatgcgaaagccgcagaggcagaaaaaaatgaacagcagcttcaggaagcccggaatacacagatgttgggacatatcaggacattgatccgtgagggcaatgaatttatggcagcctggcagcgggaatatgagcagatcgccaaactgcttcaggtctatcaggtgacagaagccggtttactcaaggagcatttgtttgcacgctatcgtaagcttgtgtgtgatattgaagaacgtcagagacaggaagctgcactgaaagaaaaaattcatcagttggaagatggcgggctgatgcgtatacctgcggatgttcaggattttatggattatatccgaacatgccatggcattacctgtgtttatggggctcagtatcttcaggaaacaaatgatgcagagcggcgtgcactgcttgcacggatgccgtttttgccgtacacagtgattttaaaagatggttttgcaaaagtagcggcggatgaacttttaaaggaaaaagatttcggggagcatgcgattcctgtggtcagtcttgaaacggtactttctgaagaggagccggtggagaagagccgactgctttttgccggaaaaggcagcagtttctatctggatgaaaatatgcgtcataaagtatgcgcacagagccgggagcagctgacagaacttcagcgggtgattgcccgaatggaggatcagcagcagacctatgaaaaagatatggagtcagtgagcagctttctccttgtctatgatagcaaaaaggaagaaaacagacaagcgcttcgggaaaaccagaagaaagagctggcgcttctggagaaacagaagttgatcaaagaccggatacagcagttggatggacagctgtccggggatgctgtaagtattgaggaagccgggaagcaggcggagacggcaaaagagcagtatgcggtacttgagtcactgcgggatgtcaatacagcattgactgagacaaagcatctgatcgaagaagtcagacagaaatatggaaaattggcggcaaaaaaacaggaggaagaacagaccgcaactttgctgcgcaccaaaatgcaggaacagtcggaagtgtgtgaacatacagtcagtgagaaagatctgctgataaaagactgggaagacaactggaagctttatgctgttgaaacagacggacagcagtttttgggtgaacagccgtcgaaaggacaggtgccggaagatttgacggatgatgcgctgcgggcggccttttatggcattcgtgacgcttatgagaaagaacatatggatctggatgacaaaaagcagctgatggaaagctatgcacgttctatggagcgtctgacaaagagtattgccgatagaaatctccagatggcgcgtatggaaaatctgcgggcggatggccagatttatcagacagcggctgagaatatcaggcagatcaggcaggaccttgagaatatggcacagcaggccgataatatgcggcagcagctgacggctattgaagcggacaagaatcgtctgtacggcagtgttgctcaggcagtcaatgtgattgaggaaaaatacggtgcctataaagaggtggcgttaaatgatcagagttatgaatcctacgtggagaatatgcgtcagctctatgaaaatacttcggcggagtatcgttcgctgactggacgtattgagcgtctgacaaaggaattgtatgcgctggagggaatcaggcatgatgtggaacgcttgatgaagctttgccatgtacaggaaaatctgacaacagaaacattggatgagcagatcggattgaagcgcagatatgaggaacttctgagacgttatgagcagatgcagtcccagtattttgcaaaaagagatgcgtttgaaaaggacaaagccaaagcagtgtcagaactgcatcagttaggtgcagaaggtctggcggcagaacttcgtgaacatctcagccttccggagaatgcagaagcggcaggcagagtgatgcaggaaattgaggaaaccattgccctgatccgtatagagaaagagcgtgtcggaaaaaacatggaagaccttgtcagcatcaaggacagttttgaaagtcagtgtcttcagatttgtcagaacatccggatggaactggataaactgccgaagatgtctgcgattgtcatggataacgagcagattcagatggtcggccttaccatcccttatgttaaagagaatttttacaaagagaaaatgtctgcttatattgatgatattgttaatcaatcggatacccttggaacgcaggaagagaaaatgcgctatatccggcaacagttggcctggaagcggctgttttcggtgattgtaacagatatgaatgccattcggctgacactctacaagagagagagaattgccagccaaagtcgttatctgaagtatgaagaggcggtgggcagtacggggcagtcccagggaatttatattcagttcctgattgcagtgatccattatatttcagctattcatgcaggcgcggctgcaggtgcgcatctcaggaaagtcctgtttattgataatccatttggcgcagccaaggatatttatatctgggagcctatttttgccttattaaaaaccaatgatgtacagttgattgttccggcaagaggtgcaacgccggcaattacaggtaaatttgatgtcaattatgttttggggcagaagctgatgaatcatcgtcagcagacgatcgtcgtagattatcactccaatgtgaagattgacgaaatggaatatgtgaagattaattatgagcaggaagtttttgactttgtttag

SEQ ID NO: 2802 - DNA, 3540 bp, Coprococcus catus
gtgaaagaaaagattcagttattgtcaagaggcgtatttgagtatgagaatccggagattgaagtatcagagaaggagattgctctggaagttgaggcgggcagccactattcgggtacgattcaattgaacagccgcaatcatattgaaatacgcgccatgattttctcatcgaataaatggatgcagtgcctggagtctacagtgatcggaacaacgggatgtattcattatgtttttgatacacaggcattggaaacaggtgaagtgtgcgaaggatgcttttatattgtgagcaatggcggtgagatcacgattccgtacagagtaaaggtatgcgcgcttttttgcgattccagcatgggcccgatgaatgacctggatcagttcgcatccctggccagagacaattggtcggaggcactgaagatatttaagacaccggaatttgggcgtgtttttttgcataataagaagaatcggcggatttatgcggcacttattaagggcagtgatatgtcactggcaatggaagaatttctgtgtacagtgaagcggaaacaggcggtacagatgagtgtgtcacaggatttgattgaattcgataatcttgagcatcccgtcagcgaacatctgctgatcgagaagaaccagtggggacatgtgaatattcacgtttcaacagagggggatttcttaagcgtttataagaagactgtgacggatgaggattttttgggaagctattatcagttggagtacaatattgtgccgggaatgcatacagtggcttccggcaagatcattcttgagacgctgaatcagcgtattgtggtgccggtatgctgcagacgtgagaaagccagagatgtggattttattgagagaaagacgttgaaggcttcgtggatgcatttgtgcaggctgtatttgaagtatgcgctgcatcagattgacaggaatcagatgattggttatgccagagaggatattaatggctgtctgaataacagcagggatattcttttcaaggttgttgaagcggattttctgcgtgaggaaggcaagaacgaggaagcacagaagattctggatggtatcaatggccgtgagctgagatatcgttctgcagtcgcatacagttattttctctatgtgaatgcgctgtgcagacaggatgaacattatacggagtacgtccgtgattctattcagttttatgaggaaggtcaatatcatgaccgatgggaactggtctatatgctgatgaagctggatgcaagggaagaacagcaccagcttaaggtactcagacagacgaaagcgctctatgacaggcatctgatgggcgggctcatgtatttggaggctgttaagataatcaataaggatccatcgctgattcgggaaatgggtgcttttgagatcagtctgttcctttggggaatacgtcatgattgcctgaatcgcgaaacgattttcagatttgcggatcttgtcctgcgcatgcatgtatatcacggacagtgtctgcatgcgatgatcgagatgtgttcattgtatgagacaaagaaccttctttcagcagtcctgcatctgctgattctcggtgagaagaaggatccgatctaccatcagtggtatcagctgggcattaaatcttccatcaagatgcagggactgtacgaatactatatggcgacactggatatgaagaattgcagggaattgccggttccggtactgatttattttcagtatgataatcggctgcaactgaaacagaaggcatttctgttcagatatgtgatcgagcatgagcaatggctgggcaaattgttcgaggcatatgacggtattatcaaagcctttacttttgaacagctgcagaagggtgttattaatgaggacattgccgttttgtatcatcattatctgacgaaggaagcgatgacgccgcatgttgtgaaggggatgccggcgattatttttaagcatcatattcattgtgatcatccgggaatcgtgggtgtgattattgattattccgagctgggtgaggagaagtattatccgctgaatcagggggatgcttatgtggatctttatatggatgattatcggattgtacttgtggatacccggggcggacgctatatgtcaacaatcccttatacgattgacagactgatggatgccggccgttatatcaggatctgctatgagcaggggcgggataataagatgctggtactcaacagaagtgaacgtgcattgaaatatcagatgatggatgatgtatccattgaaacatacaaatgcgttctgagcctgccggatgtaagcagacattatcagaagacgatcctgaagaatctgatcgattattattatgataattatgagggagagacccttgagaaatatttgcttcagctggatatccagcttctgggccattcagagcgcagccatattattgaatattttattcagagagggctgtttgacaaggcttatgaagctatccgggaatacggatacgaaggcattcaggataaacggatcatgcggctttgttccagagtcatccgggaaaagaatttcgcaaaggatgaactgttggtggaattagcctattttgcattttccaacggcaagtacgacgagacgattctgcagtatctgatcatgttttatgcaggaaccacagagcagctgtatgcgatatggaaggcagccggtgattttgaagtgccggcggaacagctggaggagcgtctgctctgtgagatattgtttacggagaatcatgtggccgagggctgtgacgtttttgtttcttattatcatacacatccgggacatcggttgatccgggcatttctcggatattatggctatcattatctggttcatggacagacatccggagagaagattttccagattatggagatagagctggatcaggtggagaatgcccgagatgtatgcgctctggcgctgctgcagtattattcggaggcagaccatgtagaaccggaattttatgagaaactgcagcaggaggtagctgcctttatggataagggaatccttctgccgtttttcagaaaatatgccgggaatgccgaggtgccggaggaattggctgattttctctatgcagaatatcataccagtccgaaagcagcggtgacaattcattaccgtctgcatcaggagtttgagacggagtggatcaatgagccgatgcgccatattcttgggggtattttcatcagaaccttcagactgtttgcaggtgaggagatagaatactatatctcagagcaggatgaaaatggggagaaaaccggtgagaaacatttactgcaaagggaagaggccatggatgcatggccggaaaccggtgtggaactgctgaaccggatgaatcatgcaatccagacagaggacagccaggcagtgaatgaaatgatctgttcgtatgagagaatcaatgaaatgacagagcagttatttgaactgaaatag

SEQ ID NO: 2803 - DNA, 3567 bp, Coprococcus catus
atgtttttaaaaagtattgaggtacagggctttaaatcctttgccaacaagatggtttttgaatttcataaaggcattacgggcattgtagggcctaacggcagcggaaagagtaatgtagcggatgcagttcgctgggtactgggtgagcagagtgccaaacagctgagaggatccaagatggaagatgttattttttccggtactgagagcaggaaacctctgggttttgcctacgtggcgatcactctggataattcagaccatcagctggcagtggaatatgatactgtgacggtatcaaggcgtgtgtaccgttcaggagaaagtgaatacaagattaatggccataactgcagattgaaggatgtgcaggaactgttctttgatacaggtatcggtaaggaaggctattcgattatcgggcagggccagattgacaagatcctcagcggtaaaccggaagaacgaagagaattatttgatgaggcagccgggattgtcaagtacaaacgtcgaaaagccctgacagagaagaatctggcggaagaacagcagaatctcagcagagtgcgggatattttgtacgagcttgagaaacaggttggaccgcttgagaaacagagcgagactgcaagaatttatctgaagcacagagatacactgaagcagtatgatgccaatatgtatctgttgtctttttaccaactgaaaaaagatagtgctgccatcgatgagaaaatggatattgtcagtacacagctgaaggatgcccaggagaattttgagaagatcaaaagtgcgtatgcccagatggaagcgctgatggagcagtacgatcagaagatttcacaagatcaggaggtctgcaatcagcaggctttagaaaaacagcgtcttgaaggcggcaaaaatgtgctggtttctaagacagacggcatcagcagcaaggaagaacagtttgatgcattgatccttgagacagaggcgggaatcgaagagaagaagaaactttccgaggaaagtgagaaagaactgaaagccctggaagaggaactgcaggaactggagcagcataagaacagctctgaagaagcattgaacagtatgtccggtacgatgacatcattgcgagatcagattgattcacagaacagtgatattattgaatttctgaatgaggcggcgaatattaaaggacgtatgcagcgttatgagacaatgcaggaacagacacagatcagacagtctgaattgaatcagaaactgatcgcacttcaaagtgaagaatcttcagaaggtgagctggtagaggcatttaagaaggaagcacagggcattgaactggagcttgagaggctgcaggcagaacagtccgcctgcaaaaagagagctgccaaaatttccgatgatctgatgaaatgcagagaggctttcaatgcggctgagaaatctttccatgaagagtcagcacgttatcagacactgaagaatatcacggagcgctatgacggttacggtgtcagcattcgtaagatcatggagcgtaagagtgactataaaggtatcattggcgttgtggcggatattatccatgtcagcaaagaatatgaaattgccatagagacagctcttggcggcagtatttccaatattgttacggataatgaacagacggcaaagagtatgatacagtttttgaagaagaatcgttttggccgtgcaaccttcctgcctttgacgagcatcagggggcgcagggcagagaatgcggacagaatctgtggtgaggaaggtgttattggtctggccagcgatctgatccgtgtggacagtcagttcggacatctggcggattacctccttggccgggtgtttattgtggatcatattgatcatgcgttggcgttggccaagaaatatcgttattctttaagaattgtgactttggaaggcgagtccttaaatccgggcggttcattatccggtggtgcctataagaatacaggcaaccttcttggcaggcatcgtgaaatggaagaattgcagaaacatgtggagacacttcgcaaagagggtgcctcgctgaaacagcagatcaatcagctgcagtcagacaaagacagtaataaagcagccatggagaaaaatacagctgaagaatcccggcttacactccatcaaaatacggtgcgtctgcgtctgaaacaggttgatgagagccgtggtgagcatgcaaaatccattcaggatattaatcgggagacggcccagatcaaaacgcagcaggaacagatcaggcagttcaggcagcagctgacggttcagatggatgaactggaggcaaagaagaagaatgctgaggaactggtgacatcgttgacggccaaactggaagaaatctccgaacaggagaaggatttcaatagtcagacagcagatatgcggattcattatgccaatcaggtacagaagaaatctttcattcgaaagagtatggatcaaaaccgcagcgaaatccgacatttacaggaaaaactggcagattaccgtgcccagaaggctgttttcggaagtgagaaggatgcaatacgaagacagattgatgaaacagaggcccagattgctgctttgacagaagaaatgacaaaaagccagacagtgcttcgccagaaaacagatgaacgcagcaaatatgcagctgagcataaaacattttttgcaaaacgtgaagaattgtctgagacgatcagtcagctggacaaagaacagttcagacttggcagtcagaaagaaaagctggaagagagccgtagccaactcagcagttatatgtgggaagagtatggcctgacttatcagacagccagggaattatcagatgatgcgctgcaggcactgccgttggcgaaactgaaaaaaatgacagcagatgttaaaggacagatcaaagccctgggcaatgtcaatgtcaatgccattgaagaatataaggcagtggccgagcgctatgagacgatgaagactcagcatgatgatatggtggaagcggaagagaagcttgccggcattattgaagatctgaacagttccatgcagaagcaattcaaggagaagttcatgcagattcagaaagaatttgaccgtatattcaaacttcttttcggcggcggaaaaggtacgctggaactggcggatccggaaaatctgctggagacaggtgttattattacagcgcagccgcctggtaagaaactgcagaatatgatgcagctgtccggcggtgaaaaagcattgaccgcgatcgcattgctttttgccattcaaagtctgaaaccttcaccgttctgccttctggatgagatcgaagcggcgctggatgatgccaatgttaagcgttttgcagaatacctgcataatctgacaaaggatacgcagtttattgttattacgcatagacgaggaacgatgaatacagcggatattctttacggtatcaccatgcaggagaagggtgtttcaacacttgtatccgtgaatctgatagaaaatgaattaggaaaatag

SEQ ID NO: 2804 - DNA, 3687 bp, Coprococcus catus
atgagtattcagtggagtgaaaaacagcaggcggtcattgatgcaaggggctgttctgtgcttgtatcagcggcagccggttcaggcaaaaccgcagttcttgtggaaagattgattcgattactgacggatgaaaagcatccggtggatattgagcgcttgcttgtagtgacatttaccaatgcggctgcagcggaaatgcgtgaacgtattggcagagggttggatcagaaattgcttgaagaaccggatcacacagcatggatccggcagaagcttttattgccctgtgcccagatctcaaccattcacagtctctgcttgaagacaatccgtgaacattttgaagtactggatctggatccgtccttcagactgggagatgaagctgaactgaagcttttgaaatccgatgtggcagaggatgtgatggagacttattatgcatcagaaaacagggccttcagagcttttgtggatcgctatgccaacggcaagaccgaccagggaattgcagaaatgatcattgcgctgtatgattattcaagaggatttccgtggccagaatattggctgaagcattgtctggcggcttattcgacagatgaagagcataatggagccgaccaggtgaaagaatttgccatgatgcagctgaataatgtcctgaccaaatatctgccgctttttgaggaagcccgggcattctgtcttgagcccaatggtgtggaagcttatcttccggtgatcgaggatgataaaaagtggtttcagatgcttggtgagtcggaagattatgacggcagcagagaaattttgcacaagatcgtctggaaacgtctgccgagaacggcggcgtccgttgacccgaagattaaagagaaagtgaaggagattcatgcggatttcaaatcagagatagaagggcttagggatggctattttgtacacacatttgaagaactgaaggcggagctgacttatatccgcccgtcggtcaggatgctgatcgaattgacagaagttttcggacagcagtttatggcggtaaagaatgaccggaatatgctggatttttcagacctggaacattacatgctgcagcttctggctgatttttcagaagatgaacaggggcagatgcaggtgaaaccgacatctgctgcagatgaactcagtgaattttatgaagaggttgtctgcgatgaatatcaggacagcaatcaggtacaggaattgatcctcagccttttgtccagagaacgcaaaggtcagtataatcgttttatggtgggagatgtgaaacagagcatttatcgtttccgactggcagatgcagctatttttatggaaaaatatcaccattatgctcttggagaaagtcagaaaacaaggcagcgtattgatctttcacagaatttccgaagcagggaaagtgtactttctggcgtgaattatattttccgtaagatcatgaagaagagtctcggcgggattgactatgatgatcaggcagctctttatccgggaatggcatttccggaggcaaaaggcaaaaatattgcggacaatacggaacttctgtttctgaagggagacggtgagacgacggagccggataatgagagcctggattctgtggagcttgaggcgaagctggcggcagtcaggatccgggaattgacagatccggagtatggaatggatatttatgacggtgcgcttggagattacaggaaagctgggtacaaagatattgtcatacttcttcggacggtgacaggatgggctgagaagtttgtggatgtgctggcttcagagaatattccttccacggctgaaatgtccgccggattttttgacacgctggagatacggacaatgcttcagttcctggcaattgtcgataatccggggcaggacatcccgctggcagcggttttgtgttcgccgatcgccggtatttcttcggaagagatggctctgatccgttccaaacattcagaaggcagtctgtttggcgcatgtatggcatgcagtgaagagacaccgggagcagcaaagcttaaaaagtttcttgcgatgtttcatgatatccggcgagcttctgtttatctggaactgcatgagttgatccgctatatctatgatcggacaggctattatgattatgttcaggctttgccggggggcgaaaggcgaaaggccaatcttgatctgctgcgtgagcgggcagtggcttatgcggccggcagttacagcagtttgtttgactttatgcgatatattgaacagctcaaaaagaaccagattgatttcggtgaggcggtgatgcctgaaaatgacaaaggccgtgtacggatcatgagtatccataagagtaaagggctggaatatcccattgttattctggccggactgggcaaaaaatttaattttcaggacagcatcagcaagctggttatgcatgcaaagagcggcatcgggttggatgcggtcaatcttcagacacgcaaaaagatgacatctgcctataagaaatttattgcggcccgactgaatctggaaacgctggcagaggagcagaggattttatatgtggctatgaccagagccaaggaaaaattgattatgaccggcatggagagcctgaaaaataccgacaaaaagcttgaaatctggcagagaaacagtggaattttgggtgaagtttttcctgactggatgctgacatccgccaggtcttatctggactggatcatgccggctgtaatgaacggagaagccgagaacgttgtgacgttcagaatggtggatatccgtgcccttgccggccgtgaagtggggcgcgttatagataaaaaatggcagaaagaagaactgcttcagcgaaagcatactttgcccgacgtgtcggagacggacgtttctaaacgacttttcggggaagaagcatggcagtatcctcagaaagcattattatcagtcaaaggcaaatattctgtttcagaattaaaaaaatatgccatggaagcaatcatggaagcggcaccggcaccggggatggccctggctgaaaagcaatcagaaacagaagaggcgctgcctgattttatgaaggataaggaagcggatgaaacacacgaagtttcgaatgtcggggctttccgtggtacagcttatcacagggcactggaactgatcgattttgcggggcgtcctgatgaaagagatgaagcatggctgcgcagtcagctaaatgcgatgacatctgcagggcgtttatccggagagcagaggcaaagtatcaggattcgggatatcgctgatatggtgttttcaaatctggggcttcgaatggcagaggcggatagacgtcatgaattatatcgtgaagcgcagtttgttatgggtgtgccggtatccgcactgtatccggaagtggacagtgaagaaactgttttgatacagggaatcatagatgcttattttgaagaaaatggggaactgattctgttggattacaagactgaccatgtctcaaaacaagacggtgcagatattttgaaaaaacgttacaagcggcagctggatgattatcagcaggcactggagcagatgcttcagaaaaaagtccgtcagaaattgatttactcatttgcattaaagtgttggattgaaatttag

SEQ ID NO: 2805 - DNA, 3225 bp, Coprococcus catus
atgccacagagaacagacattcataaagtacttattattggttctggtccgattattatcggtcaggcctgcgaattcgattattcaggcactcaggcctgcaaggcattgaaaaaactgggttatgagattgttttggtcaattccaaccctgcaactattatgacagatcctgagacagcggatgtgacgtatattgaaccgttgaatgtggaacgtctggaagagatcattgcaaaggaacgtccggatgcgcttttgccgaatttgggcggacagtccggtctgaatttgtgtgcagagctgaataaggccggtattttggataaatatcatgtaaaagttattggtgtacaggtggatgccattgagcgtggtgaagaccgtattgaatttaagcatgcgatggacaaacttggtatcgagatggcgagaagcgaggtcgcttacagtgtggaagaggcccttgctattgcagataaactggattatccggtggtccttcgtccggcttatacaatgggtggcgccggcggcggccttgtttataataaagaagaattaaagactgtttgtgccagaggtcttcaggccagtcttgttggccaggttcttgtagaagagtccattcttggatgggaagaactggaactggaagttgtccgcgataaagataacaacatgattacggtatgttttattgagaatatcgaccctctgggtgtgcataccggagattctttctgtgcagcaccaatgctgacaatatctgaagaatgccagaaacgccttcaggaacaggcttataagattgttgaatctgttgaggttattggtggtacaaacgtacagtttgctcatgatcctgtgacagacagaattattgttattgagattaatccacgtacatcacgttcatctgctctggcttctaaggccacaggtttcccaatcgctcttgtgtctgcaatgctggcaacaggcttgacactgaaggatattccttgcggaaaatatggtaccttggacaaatatgtaccggatggagactatgtggttatcaagtttgcacgctgggcttttgagaaattcaaaggcgttgatgataagcttggcacacagatgcgtgcggtcggtgaagttatgagtattggaaagaactacaaagaggcctttcagaaagccatccgaagtcttgaaacaggccgttacggtcttggtcatgcaaagaattataataccatgacaaaggaagaacttttacatttgctgattaatccgacaagtgaccgtcattttattatgtacgaagctatccgcaagggtgcaacaacagaagagattttcaatctgaccaaggtgaagacatactttattgagcagatgcgtgaattggttgaggaagaggaagaaatccttaagtccaaaggtcatctgctggcagatgcacttttgatccaggcaaagaaagatggcttctctgataaatatctgagccagctgctggagattccagaggaagaaatccgcaatcacagaattagtcttggggttgaagaagcatgggaaggtgttcatgtcagtggtacaaaagacagcgcgtattattattccacttacaatgccaaagacaagaatcctgtgtctgaggcaaaaccgaagattatgattctcggtggcggtccaaacagaattggtcagggtatcgagtttgactattgctgtgtacatgcagctcttgccttaaagaagcttggttttgagaccattattgtcaattgtaatccggaaactgtttctactgattatgacacatctgacaagctttattttgagccgttgacactggaagatgttctcagcatttataagaaagaaaaaccattgggcgtgattgcccagtttggcggtcagacaccactgaatctggcagcagagcttgagaaaaatggcgtaaagattcttggtacagcacctgcagtcatcgatcttgcagaagatcgtgatctgttccgtgccatgatggaaaaacttgacattccgatgcctgaatccggcatggcaacaaccgttgatgaagcactggagattgcaaataagattggttacccggttatggtacgtccttcctatgttcttggcggccgcggtatggaagttgtctatgatgatgagagcatggcaggctatatggcagctgcagttggtgtgacaccggacagaccaatcctgatcgaccgtttcctgaatcatgctacagaatgtgaggcagatgccatcagcgatggaacacatgcctttgtaccggctgttatggagcatattgaactggccggtgttcattccggtgactctgcttgtatcttgccttctgtacatatttcacctgaaaatgtggcaaccatcaaggaatatacaagaaagattgccgaggaaatgcatgtcaggggcctgatgaacatgcagtacgccattgagaacggcaaagtgtatgttctggaagccaatccgagagcatcccgtacagtgccgcttgtatctaaagtctgcaatatccgtatggtgccgttggcaacagatattattacatcagaattaacaggtcgtccgtcacctgttccggaattgaaagagcagaagattccatattatggtgtcaaggaagctgtcttcccattcaatatgttcccggaagtagatcctgttctcggaccggaaatgcgatcaaccggtgaggtacttggattatccgagtcctacggcgaagcctttttcaaggcgcaggaagccgcatctctgaaactgccgttggaaggcacagttttgatctctgtgaataagaaagataagccagaagtcgtggatgtggcaaagcgtttccatgaagacggctttaagattattgcaacaggaaagacctgtgatctgttgaatgaatccggtattccagctgaaaaggtgaagaaactttatgaaggacgtccgaacattctggatatgatcacgaatggcaagattgaccttgtagttaattcaccggcaggcaaagaaagtgtgcatgatgacagttatcttcgtaaagccgccattaaggcaaagattccatatatgacaactatcgcagcagcgaaagcaaccgctgagggcattggttatgtgaaagcacatatggaagaaaataatgtagttaaatcactgcagcagatgcacagtgaaattcaataa

SEQ ID NO: 2806 - DNA, 3537 bp, Coprococcus catus
atgaaagcgtttacacagccattacatgatttaagtgaatatgatcagatcgtcagcgatcttgccggacagcggacaccaattcatatagatggctgtatagattcacagaaatgccatctcatcagcagtatcggagaaccttatccgtttaagctgatcgtcacttataatgagattaaagcaaaagaaatttatgaggattaccggttttttgaccgaaatgtttattattatccggccaaagacattattttttataacgcagacattcacagcaatctgatcgtcagtcagaggatggacgtgatccggcgaatgatggatagatgcccggttacagtggtgacaactattgatggtttgtcagacagactgctgccgttggaagaacttcagaagaaccgatgtgtttttaaggtgggagatattctgccactggaagcactcagcaggaaattgacggcgcttgggtttgaaagagtcagtcaggtggaaggtccgggccagtttgcggtccgcggtggaattcttgacatttataatctggcggatgagtgcccttatcgtgtcgaattgtggggagatgaaatcgattccatcagaagttttgatgcagagagtcagcggtctattgaacaggttgatgaggtgacaattgatccggctgccgagtatattatgagtgtatcggtacgggatcgtggattgaagctgatcgatcgggacatgaagcagcagatgcagagattgaaggatgccgggaattatgaagcggcggccagattgaaacaggcagttgcggaattgaaggacaatctggaattgagcagcgcagcttcaggtatcgatagtcttgtgcagtatttttatgaccatacagtttcatttttggattatttcacggaaaaggatagtctgatcatcctggatgagccggcccgtgtggcagagaagggggaggctgtaacggcagaatacagagagagtatgatgggcaggctggaaaagggctatgtgctgccgggacagacagaggccatttatgaatgtcggaagattctggcacggatgggaaatctgcggacggttttgctcagtacgctttcctataattcagcgcatattgcagttaagagtaaatacagtatgatgaccagcagcatgcatacctacaggggggattttcagctgttggtaaaagaactgacaggatggaaaaacagcggttatcgactgattcttgtctgccgttcggagacaagaggcaaacgtcttgtcaaagaccttgcagagtatgatctgttggctttttattcagaagacagggaccgggtgccggcgcctggagagattatgattattcacggcagtcttcataagggcatacagtatccgatgatcaaatttgccattatcgcagaatcagatatgtttggtgaagataagaagaagcggagaaaacgccgacagcctgcatcggagggagagcgcatcagaagcttcaaagaactgtctgttggggactatgttgttcatgaaggacatggcgtcggtatttaccggggcatagaaaatgtagaagttgacggtgtggccaaggattatatcaagatagaatacggcggtggcggaagcctgtatattttggcgacaaatctggacatgatccagaaatatgcggataaagataccaaacaagtgaaggtcaataaaatgagcggaccggagtggacccgtaccaagacgaaggtaaaaggggcggtcagagagctggctatggatctggtaaagctgtatgctgcccgtcaggagtcagaaggatatgtctgtggcccggacactgtgtggcagcgggagtttgaagaaatgtttccgtatgaggagacgcaggatcagctggatgccatagaagcaacaaaacgtgatatggaaagtacaaagatcatggatcgacttgtctgcggtgatgtgggctttggcaagacagaagttgccattcgtgcagctttcaaaatggtgcaggagggacggcaatgcgcagtgctggtgccgacaacgattctggctcagcagcactacaatactttttgtcagcgtatgaaggaatatccagtgaatattggacttctttcgagattcagaacaaaggctgaacagaagaaaacactggaagatctcaaagccggacgggtggatattgttattggcacacatcgtcttctgtcgaaagatgtagagtttaagaaccttggtctgctggtggtggatgaggagcagcgatttggtgttacccacaaggagaagatcaagaaaatcaaagagaatgtggatgtattgacattgacggccactccgattccgcgaacgatgcatatgagcctgatcggtattcgggatatgagtctgctggaggaagcaccggtggatcgtcagccgattcagacttatgtgatggaatataatgatgaattgatccgggaggctatcatgagagaactggccagaggcggtcaggtgtactatgtgtataacagagtcaatggtattgatgaaatcgctgcgggattgtcagaacttgtgccggatgcttcagtggcctatgcccatggacaaatgagtgagcgtgagctggagaaaattatgtatcagtttattaacggggaaatcgatgtgcttgtctcaaccacgattattgagacagggcttgatatttccaatgtcaatacaatgatcattcacgatgcggataaacttggactttcacagctttatcagctgagagggcgtgtcggacgatccaacaggacatcctatgctttcctcatgtacaaacgtgacaaaatgctgaaggaagtggcagagaagcgtttatcggcaatcagagaatttacggaattgggctcgggataccggatcgcaatgagggatctggagattagaggtgcaggtaatctgcttggtgaacggcagagtggacatatggaggctgtaggatatgatctgtactgcaagatgcttaaccaggctgtgatggaggcgaagggcgaaaagattcaggaagacttcgagacatctgttgatattgatattgatgcttttatcccatctgcctacattaaaaatgaatttcagaagctggatatgtataagcgaattgcgtcgatacagaatgcggatgaatatggtgagatgttggatgagctgatcgatcgtttcggggaattgccgaaaccggcggccaatctgcttcttgtggcgctgatccgtgcagaggcccatgcagccggtgttgttcaactggtgcataaggaaaaagaaacccggatctatatgcatgagcgtgcagacgtggacgttgcggctattccggattttctggctgagtacggcagaagaatccagtttaaggcaacagcaaagaatccgtatttccttgtaaatatgaatggcttcaaaggtcaggggctgcttttggaagaaaaatcattggtagagaatatgctgagaattctctgccataaagagcttaattag

SEQ ID NO: 2807 - DNA, 4389 bp, Coprococcus catus
atgtctaatcttactacaaatgatacacagcttttcgttggtattgatgtaggttccacaaccaccaaaatcgttgccatcaatcccgaaaagcatgaaattttattatctaattataaacgccacaacgcagcccaggcccagagtgtacaggatgccctggcattttttgaggataaatttccaaatgcccgtatccgtctggccctgacaggctccggtgccaagcatctggctgaagctcttggctgctgctatattcaggaggttgttgccaattccatcgccctccagaaggaatatgacaatgtgggaaccgccatcgaactgggcggtcaggatgcaaagatgattttcttccgccgtgacccggccacacagacgctgaatgtagcggatatgcgtatgaatggcagttgtgccggcggcacaggcgcttttatcgatgaaattgcttctatactaaaggtacctgtagaagaattcaatgaactggcctctcagggcagctgcatttatgatatttccggccgctgtggtgtttatgccaagacagatatccagcccctgctgaatcagggtatttcccgccaggatctggcactgtcttctttccacgctatcgccaaacagaccatcggcggtctggctcagggtctggatatccagaaacctgttgtttttgagggtggtccgctgacctttaacccaacactggtaaatgtttttgcaaaacgtcttggcctcacaccagaggaaacactgcgtccaacccatcctgagattatgatcgcctatggcgcagctctttctctggacggtatgtttgcaggcaattcttcatggtatatgccaaaacattatcttgagctgttggagaatccggaacttcgtgcccatttgcaagcttctgcagatggtccgctgtttttcgaatccgaagaagaacatcgtgcatttaatgaacgccatcaactcccagaatttacaccctatgtgccgcaaaagggcgaaacggtccatgcttatcttggcattgattccggcagtacgaccacgaaatttgtgctgatggatgaggatgaaaatattctcgattctttttatgcaccaaatgaaggtgatccgctgactattgccaagacagccttgttgaccatccatgaccgctacgaaaaggctggtgccaaactggatatcattgccgcaggtacaacaggctacggcgaactgctgttttcaaaagctttcagcacagaatgccatgttgtggaaactgttgcccacgcccgggctgccgacaagtatatcaaagatgccacatttatccttgatatcggcggtcaggatatgaaagccatctggattgacaacggcattatcaccaatattgttgtcaacgaagcctgctcctcaggctgcggttccttccttgaaaactttgcttcatctttacatattcctgtggaagaaattgccgaagccgctttttcatccaaacatccggcttctcttggcagccgctgtacggttttcatgaacagcagcattgtcacggagcagcgaaacggcaaacaatctgcagatattatggccggcctgtgccgttccatcattgaaaatgtttttacaaaggttatccgaatctccaatttggacagtctgggcgacaagattgttgtccaaggcggtacattcagaaatgatgccgtacttcgtgcccttgagcagtacaccggtcgtgaagtcatccgtgccccttatcccggcattatgggtgccatcggcgctgctctcattactaagaaacgctttgaacagaatcacccagccaaaacatttatcggtattgacggtatggctgatttttcctatacacaagaagccaacgccccttgcccgttctgtgccaaccattgtaaacgaaccattgtccgtttttccaacggcaattcctgggtaaccaacaaccggtgcgaacgcggcgaaatcctcggtgatccgaaggatgcttctgtccgacagcagcttgcagatgcaaagaaatcccgtgaacagacaccaaatctcttcaaacttcgacaggaactgttgtttaaagactacccttatccgaaagctgctaaagaacgtgacatcaccatcggtctgccccgggtgctttcctattgggaaaccatgccattctggaccaccttctggcgtgctctgggatttaagattcaattgtccgatctgagcacacgcaaaatttacgaagacggattgtccgcagtcacttccgataccgtctgcttcccagctaaactggtgcacggtcatctgcgcaatctggtaaaaaaagatgtggatcgtattttcatgccatccatcacaacagtaacctctgaaaatacagagagcaccagcgaatctatgtgtgccatcgtcaaaggctatccgattgtcatccgtaactccgataaccctgaaaagcgttggcatataccatttgacgcaccacttttccactggtacaagcgcgaggacagaaaccgtcagctcaccggctatatggagaagactttcggcatttccccggcagaaacccgacaggccattaacgtcgccgatgccgctgaaaaacagtttcatgatgaaatgcatcgggcgggaaaagctgttcttgatgaagtcactgccaatggcagctatgctgttattctggcctcaaggccatatcagaacgatgcccttgtgaaccatgaccttccggaaatgtttacaagtctcggcattccggtgctgacggcagattctctggaagaagccgaccatgtggatttaagcatgagccgactggatattgtcaataattatcatgcccgcatgctgtccactgctattctggctgccagaaatccacatctggaatatgtgcagattgtcagcttcggctgcggacatgacgcttacctttccgatgaaatcattcgcctgatgaaggaaatttccggcaagacaccgctggttctgaaactggacgaaagtgatatccagggtccgctgcgtatccgtgtccgttcttttacggaaacggtcagcatgaaccatgccattcatccggaactggatattcacccgttggaagacccttacccggtgaaattcaccaaagaagactgccgcaaaaagattgtccttgttccgaatacctcccatgctttctgtcgaattatgtcagccgccatgcgaggacagcatattcaggcagaaccactggaaatcggccgtgaagaagccatccgccttggcaaacagtatgtccacaacgacatctgtttcccttgtcagattgtgatcggtgaagcactggctgcattaaagagcggcaaatacgacggcaaagaagtggccatcggtatgggcaaatatatcggcgactgtcgtctgacccattacagtgcccttcttcgcaaagcccttgatgacgccggattccatgatgtgccgattctgaccaacgatgatgtagactaccacaatatgcatcccggcttccgaatgagcctgggttccgccatccgtctggcttttgctctgcctgtgattgacgtactggaagaactgctgcgcaaaatccgaccttatgaaaaggtggccggcagcaccaaccgtgctttcgaaaaaggtatggatgccgttgtggaaggccttgagcttcacggtatcagcggtctgaaaaaaggctttaaaaaggctattgacctgatgaaccaggtaaaatatgaccgcaccaaccgtcgtccgcgggtcctgattgtcggtgaatacctgttgaacttccatccaggtgccaatcacgatattgaaaattatctggaacataacggcttcgaaatcattgaagcccacatgacagacgtcatccagaaatcctatttctatctggatgcgcagattaaagaatataaattaaagaaacctttaaacaaaaaaatctggttttcgacagtagacactgttttcgacatggcccacaatatggcagatgctatcgccaaaaagcatcccctctatacaccggcctgccgaatgcctgaccttgtcaaagccagcgacccgatcatcaatcatacatttgatgccggcgaaggcgtcctgattccgggagaaatcctgcaccatgccaaagacggctgccgttcctttgtcatccttcagccatttggctgcctgccaaaccatgttgtaggccgaggcatcagcaaacgcctgaaagaaatgtacccggatgcacagatcctgccattggactatgatccggatgtcagctttgccaacatcgaaaaccgactgcaaatgctgattatgaacgcaaaaagcgggaatattaaggataaaaattaa

SEQ ID NO: 2808 - DNA, 2127 bp, Coprococcus catus
atgattgttatcaaaagggatggacaggaagtcaattataaccgcagtaagattatagttgctatcgggaaagccaatgaggaggttccggaagaagagagaatctcgaatcaggagattgaagagattgtttcttatgtggagactagaaagagaaagagaattcttgttgaagacattcaggatatcatcgagcagaaattgatggccttagggaagtttgatttggcgaagcgatatattgtgtatcgttatacacgtgagttggtgcgccgcgccaatacaacagatgattcgattttgagcttgattaagaacagcaataaagaggttatggaagagaattccaacaagaatgcgacagcagcttccactcaaagagatttgatcgcaggcgaagtttccaaggatctcacgaaacgactgcttttgcctgagaagattgcaaaggcccatgaagagggaattctgcatttccatgatgcggattattttgtacagccgattttcaactgctgtctgatcaatattcaggatatgttggacaatggtaccgttatgaacggcaagctcattgagagtcctaagagtttccaggtagcctgtacggtgatgactcagatcatttcagcagtagccagcagtcagtatggtggacagtctgttgatctgaagcaccttggcaagtatctgcgcaagagccatgataagtatgaaaaggcctatagagcacattttggcgatgaatttgatgatgataccattgagaaacttgtccaggatcgtctgaaggatgagctgaagtccggtgttcagacgattcagtatcagattaatacattgatgactaccaatggtcagtcaccttttgttacactctttctgaatctggatgagaataacgaatacattgaagagaatgcaatgattgttgaggaaatcctcagacagcgtcttgaaggtattaagaatgagaagggtgtttatgtaacacctgcatttccaaagttgatttatgttctggatgagaacaactgcttaaagggtggcaaatatgattacattacgaagctggctgtgaaatgttctgcaaagcgtatgtatccggattatatttctgcgaagaagatgcgtgagaattatgaaggcaatgttttcagctgtatgggatgccgaagtttcctgtcaccttggaaggatgagaacggcaactataagtttgaaggtcgatttaatcagggtgttgtcagcattaatctgccgcagatcggtattctggcgaaagggaatgaagaagtattctggaaactgatggacgaacgtcttcagttatgttttgaggcgcttatgtgccgtcacaatgcgttgaagggtacattatcggatgtcagtcctattcactggcagtacggtgcgattgcccgtctgaataagggtgagaagattgatccgcttctgtatggcggttattctaccatgtctcttggctatatcggactctatgaagtaaccaagctgatgaagggtgtcagtcatacggatcctgtgggcgaggagtttgcacttcgtgtcatgaatcatatgaaggaagcagcagacagatggcgtgatgagacgaacatcggtttcagtctatatggtacaccggcagaatctctttgctatcgttttgcaagaatcgatcttgagaagttcggtgagattaaagatatcactgataagggatattatacgaattcttatcatgtggatgtcagagagaagattgatgcattcagcaagttctcatttgagagccagttccagaagatttcatccggcggatctatttcttatgtggagattccgaacatgagacataatcttgaggcattagaggaagttgtcaagtttatctatgacaatattcagtatgcagaatttaatacaaagtctgattattgtcatgtctgtggttatgatggcgagatcaagatcaacgatgatcttgagtgggaatgtccgcaatgcggcaataaggatcactctaagatgaatgttacaagacgtacatgcggttatcttggcgagaatttctggaatgtgggtaagacgaaagagattaatgccagagtgatgcatttgtaa

SEQ ID NO: 2809 - DNA, 2532 bp, Coprococcus catus
atgagcagaactaagaagatactattgacgctcctagcctatcttaccgcttttattgcagcagtctgtgtcagcagctttgtgcttaatcagggaaaggtcagcggtgagcagcagcgttcaagcgcggatctgccgcttttgtatgtgcgtaccggcggtgaactcatgaatgaaatgcatgggtacacagagccggtagacggcggttactacagagatacgctgacacctgtaggtgagagcaagaccatcaatctgagtatggatacctatggacacaacatttcctctgtcagttttgagctgtacaatgatcagtatacagatctgatcgaaagcggagactgtaccgacatggaaaaggtcaatgctatggttcagatgcagctccaattcaaaaacacactgtattccaacagggagtattgtctgcatctgatgctgaaaaacgatcaggatcaggtttatcattattatacaagagtccgttacggatcggatctgaaggtagctgagaaactcaagtttgtcctggatttcaatgaaacgactttcaataaggacagtgcagatgctttgagcagttatcttgaatcaacatcctcttcctcgagttcagacaagagtctggtgacgctgtattcatcgtcggatacggtgacatggggaagtatggcgccataccgaacaagcgagatcgctattcgtctgaaggagattaatacggagacggcggcttttactttgtcctatacgatagaatcttcagccggagatattaatacattttataatgtcaatgagtattacaggctgcgatggacagattcaaaggtctatcttctggattttgaacggcggatggcagagaatatcggactggcagatataactgtttcttcaggagcactcaggcttggtatcggagacgcttcagatatcgactatgcctcctatggaacagaccagcagcagtatacctgggtaacaggcgatcagcagctgtggctttatgacaataccaaccgtattatgaccaaggtttatacggaggaggatgacaatcacaattgcggacgacaggatgaagccggcataaaggttgttcatgcggatcctgaaaccggagatttgtattttattgtgtatggttatatgcattccggtaattacgaaggccgggaaggcgtgatggtttatcatttcagccatgaagatgttcttctggaagatcttgtttttattccttttaataaaggttttgagcagatgcggtcaggcctggaggaactggcttatatgaatgatgacggcacactgtatcttttgctggaagataccgtttatgccatcgatgtcaatatgggcaaaatggatgtggcctacaaagacctcaacagcagcaattgtacagcatcgggagacggcatttttgttatgtgtgacggtggtgatgaaaatgccggagaacggctgaagatcgttgatctgaattccggaaaggaaagaaccattgaaggcggcgactggcggattgttcctcttggctatgcgggaaaggatctgatctatggtctgatcgatccacagatgttgacagaggattcctccggtgtcattcgcacaccgatcagcgaagtgcacattttggatgagaattataatgaggtcaagacgtatcagaagagcggtgactatgtgatgcggctgaccatcagtgacggcaatatatccatgaagctggccaaggctgtaaagaacggcaattatacggattatcaggatgctggtgaagattatatcatccgtaatatcgaaaatgatgaccagaaaatttatgtggataaacaaaaggacagtatcagaggacagcagaactggctgcatctgaatacatccgacagttttgtgccgatttcacagagtgcccgttacctggatccgggttatgatatttcaaggaaatacgaagatacggatcaggtggaaatgcagtattatgtttatacaaagggacgcatggatgcggcatttgcgacgatccaggaggctgtggattacggtacgacctacgccggcacgattatgaccagccacaagcaggtgatctggcagaaagccggaagagcttatatctgggatctgaatattgacagtattgacaagaccagcaatacacagagcatgaacagcattttgatcaagacgattgcagattacgaaggttgggaattaaatggcacaatcgatgatgcagagccgttatttgcggcgatgacagcagtacttccggcggagacgattgatctgagcggcctgaagctggatgatgtgcttcattttgtttatcgcgaccgtgttgtggctgtcaaactttcaaacaacaattacggtctgatcacggcttatgataatgattatgtctggattgcggatcctgcaaagggagaagtatattccatgacacagacagcagcagaaaagctttttgagcagaatggaaaagtctactatagctatatggattaa

SEQ ID NO: 2810 - DNA, 3249 bp, Coprococcus catus
atgaagccgattcagctgacaatgcaggcctttgggtcatatgggaagaagacggtgattgattttacaaaaccggatcagaatttatttctgataacgggcgatacaggttccgggaagacgacaatttttgacgctattgtttttgcactttacggagaagccagttctgttgtgaataggaagaacggtgccgaattacagagtcagtttgcagcggcatctgtggagccttttgtggaattggttttttcagaaaaagaaggcagtgaagatgtgcactatacggttcgacgtgtaccgaagcatgtccgccctctgaaaagaggaaccggtctgaaggaagagagcggcagtgtgtcgctgattatgtcagacggaaccgaatatccgtcaaaggaaacagacaggaagctggaagaaattgtcggattgacgaagaaccagtttatgcaggtggcaatgattgctcagggggagtttatggcccttttgcgcgcaaaatccgatgacaagaaagtgattttcagaaaactttttaatacagaactttaccagaatattgtggatgagctggcaaagcgccgtaaggacaaggacaggaaaatcgcacagatcaagacagcctgtcagacagaagtgggacatattcttgtgccgaaactggtgacagcggatggtgcagagacggatcaggaacagaatggtgcagcggatcaaatagcggacgagtgtagagatgcgaataaactgcaggagttaaaagaaagaatccttaaatcagaaaggctttcattgccggatatggaggctttacttcagactttggtatcagtcagtgaatggacgaaggataaggtgcagcagtcagagtcagagacaagccaattgtataaagtctatctgttgaaaagagatgctgtcacaaaagcagggcagttgctggaacgttacaaggagcttgaggatgctgaaaaggaactgggtgaatgtgaagcaataaagcctttgatgcaggaatggcagcaatgcatgtggcagattgaggatgcctatgatattttgccgctttggaagcaatatcaggaggtcagtggacagcttgaaacagcccgacaggcactcgctgccaatgagcaggcactgccggaacagaaaatggcctgtgaacaggcggcagttcaactgcagcaggcaaagaaagtacaggaacaggcattgatggatttctcggaagtgaaaacccatgtcgaaaatgatttagaagctttttccaaaatggctgaagctaaacggaaggtgttgacggctcaaacaaaagtcgatgaagcaggaaagcaggccagaatagcagaggaaagtctgtcagatcttgaaagtaatgagaaacagtggcagactcaggctgaactgctgtccgatacggatagccgcatgattattttacaaggaaagcagcgggatattgcaggtatcggggcggattttgagagctggaaggatgaagaaaaggattgcttcagccaacagaggtgtgctgaagaagcagacaaggtctatgctgatgctaaagacagatttaataaggagaatacggcttacatacaggcctataatgatttccttgatgcgcaggctggtttccttgcagagaaactgcagcggggagaaccttgcccggtctgtggttcgaccatacatccgcatcctcatcaggcagaaaaatcggcattgaccaaggaagaattgaatatattgtctgagagtgtacgtgaacttcaagaaggacaggcggcggcagcgaaaaaagccggagaggcaaaagcaatgctggatgcaaaggaaaaaaattgcatacaaatttgggaaaaacttcggcagaaagtaattgcatatagccgtgatgagatgggtgagttggacagtgaagagattcaaggtctgattgagacttggaagaaagcgctgaaagatgaagagaaacagctgcagaaagacaaaaatcagctgcagcagctcaaaaaatggctgacgaaagctgccaaggacaaagaagaattgactgcacaaaaaaataaagcagataaaatgttagctgataccaaagccgagctggcggcagctcaggctgagttaaagagtacatttatttctacatattataaatctgaagaagaagccaatcagttcatggagcaggccgagcaaaggaagaagaacgcagaaaagcaatatcatagctgtgataaagttgataaaaaagtacgatcagataaagaaaagacagagctagaaatagcacagcatcgacgcgatattccgaatttgcaggataagagtgataaacgaaaagcagtctatatacagctgatggaggaaaaacagctgacggagcctcaatggaagtgtgtgacagaaagttatgataaggcagacagacagcagtttgaagaaaaaatcagacaatatcagagtaagctgagtgcagcaggtaagcagaaggcagtagcagagaaagccattgacggccgtgtgaagccggatatggaacagctttgttctgaacgaaatgtagcagaagcggcatggaaaaaagaacaggctctttatgagcgctatgcagaaatgtataaaaccaatcatcgggtttgtgaagcgttgatgccgaagatggctgaacgaagcaaaatcatggaagaacacagaagactggatgatttgtacaatttgttagcaggcaaagtgacgggagccagaatggatatcgagacgtatgtgcagcgatattaccttgagagaattctgtatgccgccaataggcgtttcggtgaaatgtctgccgggcagtttgaactgcggatgtgtgatatcacgaaggcgggtgaaggaagaaacaggggactggatttgatggtttattccaacgtcaccggcaaggagagggaggttcgcactctttccggcggagagtcgtttatggcggcattgtcactggcgcttggcatggcagatcagatccagcagagttcatcggccattcatctggatatgatgtttattgacgaaggattcggctcattggacagccaatcaagagatcaggcagttcgggtattgcagcagatggcaggaggatcgaagctgataggtattatttcacatgtgtctgagctgaaacaggaaatagaagaccaactgattgtcagcaaagatgaagagggtagttcagccagatggcagatcagctga

SEQ ID NO: 2811 - DNA, 2628 bp, Coprococcus catus
atgaagaatagaatatcaaaaaagagacataacagttacagaaagagggagagaaatttcagagattggccaaagaatccgcatttttacggtgcgctggcgatgcttctgccgttgacggcgatactgatcgcttatattgccatgggcgttttccctttcggcaatcaggcaacgatgatcattgactcttatcatcagtatgtaccgtttttctctgaatttcatgataagatctggcatggtgaaagtttcctttattcatggcacggcagtctgggatttaattttatagcggttcaggcttattatctggcaagtccgctgaattttctgattgccttgttcccggcctcgatgatgatagaggcctttgagacgctgatcgtgctgaagatctgtctgtcaggatggacggcttatcgctatctgcggagaagaaccggaagaaatgattattcgacggttgtgtttgcatcgttttatgcccttggtggattcagcatcgcttataactggaatgtgatgtggctagacagcattgtcctgtttccgatcattcttatgggtgttgagaagctgatcaatgacagagacggtcggatgtatgcagtcagtatgggacttgctattttctgcaattactatatggccattatgatctgcatttttgttgttttgtacttttttgttatctggttttccagaaagcgagaaggcatcagacagtttctcagaagcggtattcattttgtgctgtgctctgtgttggcgggcggaatggcggccatttatctttttccgacgtattatacattgatcaacagttcccagggatcggccccgacaagctttaagatctacaggaatttcctggagatttttcgtcagcagtttgcactggttgaaccgacgcagctgacaggggcgccgaatatatactgtggcgttctgcttgtgatgctggttgttttttatgcggtttccaaaacgattccattaagggaaaagatcggacgtctttttgtaacaggatttgttctggtgagtctgaatattaatgtgcttgattatgtatggcacggattccatttcccgaataacctgcccggcagattctcttttatttatattttcatggtggttgttatggcctacgatgcatggcagtcactgcggctgacgaataagaaggttttccttgggatttttgcggcagaagcggtgctatttggtgtatgtctctggtatccgaaggatcgtctgcccctttacagtatgattgtgacaggggtgctgatggcactttacatgatcctgctgatcgcccatcggagacatgcttcattgacgattaaaggcattaaggtcctgccaaagtatctgtgtctgatggtactgacagtggaagtggcgggcaatgctatttttggcctgtgtatgaacggaaccaccaaccggacgaactatacagaggacaggcaggaggttgcagatatccgcagccgctacgaggcaaaagatactttttacagaatggaactggaacagatcagaggcagggatgatgtcacatggcatcatctgaatggtctttcattcttctcatcaacagcggatgatcgtgaggagaagttgatgggagctctcggtttttacaacagcggcaataaatacagctataaaggggcaacgcctctgacagatgcgatgtttggtatccgttatattatcagcaatgatgaaatatgggcgtcgaatctgtcattatgtgagcagacagagaataagtatatttatgagaaccaacagaatcttgctcttggttacatggtgaatccgggggttacccagtggaagatcgtggaaggggatccttttgtcacccagaatgattttgtgagaatggcaacggatactcagggagcgatgtttatcccgcttgaaacgggagagccgcaggtgacagatggcatgttgaccagtaccggtgaggataaatattattatgagcggcatggcagcggcggaagcctgacctggcagctgactttcacggagcagcaggatgtgtatatttattttgaggccagtcattgtgagaagctgaaggtgacgattgacggaaagacggagacctattctgataagcggggacatattgtgcatcttgggcagtgtgatgcagggaaggttgtgacattggattttccgatggacagcgaatatgaaacaggcaacgtgaaactgcagatgtatgccctcaatcaggatattttcgattcggcctatgcccagctggcggatgaacagctgcaggtgacaaattacgacagcacccacgtcaatggacgtattcaggtgaatcaggatggtatgatgctgctgtcgattccttatgacgaaggctggcatatctatgtggatggtgaagaaacagagatacagccggtgggtgaagcgatgacaggatgctggatgacagcaggcgaacatcagattacgatgcggtacacaccacagggatttgtggaaggagccgcgatcagtgttatttcactactgatacttgtgttgggaattgctggaaaagcaggtcttttcagcagacatcataggaaaatgtaa

SEQ ID NO: 2812 - DNA, 2610 bp, Coprococcus catus
atggcattttactccgcgttatttcaaattctgcttttgaaaggaaatataaccatgactgattttttatatcctgatattttgaatgaacaactgacctatgccagacaggcacgtgccgcatggctttggaccaatgttgccgaacgaagccggatttttctgcaagttctggatacccttcagcccatctgcgcatcccttgcccgtgacagcgtccaagagacgggctacggtatttttgaggacaggatgctcatgatcacacgcctgcttcgtgacctccgttcctgctgccttcaaacagaatctcccttttcagaacgtctttcctgcacggacacacacacccaaagccagccctccggcactttgcttggcataccatcatccatacatccggtcactgaaaccctctttgccgctgctattgccattcaaacaggaaatccgctcatttttttcttttctgacagtgcatttcagatatcggcccgaacagcctccctggtccgtgatgctgcaattgctgccggtgcacctgacaactgcattcaatggctggaaattgctgatgacaacctgcttgaaaaatgcaatcactgtcccgacatcagcggccttattctttccggactttccgccaatatccgcaaagtattttctgctttttcagcggaatgtatcctttcctttccacagcctgctttctgctatatccactacagtgctgatccgacacttgctgcagggcagattgttttatccaaaacctttgacaacggaatgtgcttgaacggtgagcagataatctgtgccgatgctgtgatcctgccgtcgctgaaagatgccctgcgccgcaccggcggttattttgcatccccggaagaaattgtccgcctcactgcgattcttgccaacctttcggacaatacagttaatccttctgttatcggacaatctgcgcaggcactggctgatctggccggtattgtcattcctgaagccacccgcctcattattcttgaaatcgaaccggataatgcttcccacccacttcttgtgccctttttgtgcccggttcttgtactgatatcggtgaatgattatgaacaggcagccgacaaaattcgtcttttatccacaaaaagtgcatctttttccactgacttccctttttccgacacccgccccctgccggcacatcattatcttgcgctttatgccgccgacaatgcaccgatttcatttttatcctatgcacttccggatttttccataattgaaaatgctccggctgcttctgtatccatgatccagcaatatatggatatctatggccatcttcttccttcttcagccattcctcagcttttttccatccgccgctgccattcgacaatgatcgaaaacgcccgctgcttttcttttcctgcagaaatttattatggacaaaatccccttgaacaactgaaactttatgaacatgaagaccatcttctctttctgcagtgtcctgcattttcagaatctgccgttcagactgtcataaaaaggatacagcaaaaatacccctttattcagtatgaatgcctaaagcttacgcccgatgattcacagatcaccgactttctctgccagcactcgctttttcctgaactgcctgctgcaccggattgtctcattgtcatcggtgacagcaccgctgtccatattgccaaaatgctcatgacccgttatcagcaatccgcaagttcttccctcccacgcctgatcatcatgacttcggatgccggatgccatgcggcgcttctgcctttttatccacactatgacagctgcagcaaccgattgacagatatgtcctgccagctttcccattttacattgattgctgacagccatttttccttttttcgaagccacaaacatctgatcagtgcctgcatggctgctatggccgatgcttttgattctctcttattcgtcggcggagatgatatttccgatgctatggctttccgttccattcagctgtttcttgtctggcttccgctttttttgtccgccccctccgaaagagggcatcaaaaaaacaggcctgacgcctgtttggaacatttgcaaaatgcatgtattttatccggactggcctgttctcataccggcctcggcctttctcatatcctctcacaacaattatgctgtgaatttcggatatcgatgtctgccttgcaggcactcctgataccccgtctgctcctgtattatggcagtgattccacacatctctccggaaaagcctggacggtttctgcctccgcctgctctgctgataactatttaaaaatgctggctgccatcaatccatccttcgacggaaaccgacgggcagccgatatactggccgaaaaaattgacacacttcttgatgatgcccatctcccgaccaatattaagagctgccatatccgagaaaaagactatcttcagcgcatagaggacctggctctgcgcagttttgaacagttatccgccatctgtgccgatgccggatccggatatccgctggtcagtgaaattgtccggattctaaaagatatctattag

SEQ ID NO: 2813 - DNA, 2691 bp, Coprococcus catus
atggttgtttgggcgtcagatggaatcgaaggagaacggatggatacagaagatacagagacagaaagggtgattcgggaaagtgaggacagggaaagtcagatccaggaagaatctgaaggcatagccggtgaaacatttacggaaaacgatgtggaaacagaaacagggattgaagattcctatgtgtatgatggagaagttttctcggaagtgaatgaatacagcgcacgtgcagtgacaaaaggtaaaattgattatacatattgggcgattcatcagggagcaggttttggaaatattcttgaggatggacgtgacctggatcatgtcggctgtattatgctgaaggtgggaaatacctggaaaacggcttactgtgtccatcataatgctgatttgaagggtggccatgaatatgcggatacagcgtcatatttgacagattcgaataaaaagagactgacaggtctggctttatattatggttttcgtttttctggttggaatccggataaaaaaactgttccgggggatagcgataaaggaaaatatacagcaacgcaggtgatgatatggatgattgaaagaggctggtatacgtatgatgcgaatacatatgcttttcaattgaatacaaaggcaatcaatgcagcaaagaaaatctgtgataaatcggatcagagccctgtcggaagttcctatgactattttaaaacgatatatagtaaaatgcagacatttggtacagtgccgtcttttacttatcggagtgagaacagtgcgcaggtcaggaatatggggtatgactttcaaacaaaccaatatgttctcaaactgacggatacgaataacgttttgtccatgtatgatgtcagtgaagtgccgaagggtgtaacagcccaaaagacgggaaatacacttaatttatattcatcagtaccaatcacatctgcgggtgtgataaagttgtcaaagaaatccttcaaagcggagaaagctgtgactgtgtggtcagaccagacaataagcggttatcagcaaattggaacttacaaagagccggaaacggcagatttgaatacctatctgaagataacagcgcagtctgtaacgatgacggctgaaaaagtatggaatgacagtgataatatttatgggaaaaggccatcagaattgatggtagatttgtatcgaggccaaagtaaaggggataaagctgtgcttgtaaaaacggtcatattaaatgcggaaaatgaatggcagtttacagtttcagatcttccgcagaaagattccgcaggcggacatatttattatatgtttacagagcgagaggcagcgggttatacagcggagacaacagagagtacagccgggacgcgtcattggaagtttacgttcaccaatacattaaatagcggtcatctgcagctgcttaagaagtcatctgatgaggcacttacaggtgggaatccctgttatacactgttaaatgcagaatatggggtttatacagatagaaactgtaccaatagtgtgggtgatctgatcacgggtgaaagtggatggtccaatacactgacatcacttgctgcgggaacatactatgtcaaagagagaaagaagccttccgggtatagaacagatgatgctgttcatgaagtaatgataaatgagggggagacaaccgtgataacattgacagatgagccaatcatcagctggggacagtttcgaattgaaaaatcagcattggatggtgcatcagtatctgatacaattccattaacaggagcggaatttaccattgattattacagagaaacaggggtaacaaaggaaaacatttccgataaggtaccattaaagacctgggttgttgctgtgaaaaaaacatttgatggtcagaacacttcgtataaggcggaattagaggatacatatctgattgcagaaaagagtgacgaacttttcagggataggatggggaaggcggtactgcctcttggaacaattgcaattcgagaaacaaaggcagcagaaggctatttgctgcaggggtatgtcgatgatgctgatggaagacggctgaacaattaccctggggaatcagttatcatcaacctggcagatgaaggtgaaagtgcatcgttttttggagaagacggattgaaatacagtaatcctgttttcagggtgacaaatgaattgcataaatgtagtatacagattatgaaatcctcagcagatgaaaagccgttggagaatgtgagatttggtctgtacgatgaaaggcgacagaaaatcctggaaagtcagacgagtcaagatggtaggataatattttcggggctgcttccggggaaatactggttaaaggaagaaaaaacaggaaacggacagcagctgctgaaagaaccaatggaaatcgtgctgccgatggtattaacagagcaggacgttgaaaaactaaaaattgataaaagtcagctggtctatgatgaaaatcagcaggtatttaaattgtatgacagaatttttgagatatcaaatgcaggaaatttagtattaccgatgacaggcggtgatggattggtcttacctgacattctgtttttggcagccgctctgctgctgatcggcgtctgcttgtttgtatatcgtaaggggaaaacaactgcccgatga

SEQ ID NO: 2814 - DNA, 2853 bp, Coprococcus catus
atgagtaaaacagtattaggtattcttgcacatgtggatgcgggaaagacaacgttatctgagagcattctttatctgacaggcagtatcagaaagctgggcagagtagataacaaagatgcttttctggatacttacagcctggagagggagagaggcatcactattttctcaaagcaggccgaaattgagatgcggggaagatcgtatacactgcttgacacaccgggacatgtggatttttcggcagagatggagcgaacgcttcaggtgcttgactatgcggtgctggtgatcagcggtgcagacggtgttcagggacatacacagacactgtggcgtcttctggcacggtatgaggtgcctacatttatttttgtgaataaaatggaccagaatgggacagacagaagggctttgatggaggagatcagacagcgcctgggggacagttgcattgatttttccgaagaagcagatgcacgcaatgagaatctggcgatgtgcgatgagaaggtgctggaaacttatctggaaaagggaactgtgacggatgaacaggtgtgcagaatggtcaccgggagaaaggtttttccgtgcttcttcggttcagccctgaaattgacaggggtgcaggagttgttggacggcattgcaaaatggacagaagagaaacagtatccggagacattcggggccagagtatttaaaatcgcaagggatgcccagggcggacgcctgacttatatgaagattaccggtggcagcctgaaggtcaaggcacagctccggggccatatacggagaagacaggaagccgggggtgaggcagaggatacattatccgggaaagatgcttcggcaggtgaatgggaagaaaaggttaatcagatccgtatatataatggaacaaagtttgagacagttgatgcagtttcagcaggtacggtttgtgcagtgacagggcttacacagacacaggccggagacggactgggagcggaggctgagcaggtagtgccccttttggaacctgtactgacttacagggttgaactgccggagggcagtgatctgcacaaggtactgcatcaattgcgtcagttggaagaagaagagccggaactgcatattgtctgggatgatatttcaggacaggtgcttgtgcagctgatgggtgagatccagacagaaatattgcagcagatgatccatgagcggtttggactggaagtaaaatttggtacaggacagattgtgtataaggaaacgattgcagcaccggtggaaggtgtgggtcactttgaacctctcagacactatgcggaagtccaccttttaatggaacctttggaggccggcagcggacttgtcttcgatactgtctgcagcgagaatatgttggatcgcaactggcagcgtctgatcctgacacatctggaggaaaaggttcacagaggcgtattgacgggagcgccgatcacggatatgcgcatcacattgattgcgggaagagcacatcagaagcataccgaaggcggggatttcaggcaggcgacttacagagcggtgcgccagggactgcagaaagcagaaagtgttctgctggaaccttattaccgcttcaggctggaattgccgcagcgtctggtaggacatgccatgacagatattgagaagatgagtggcaggtttgaacttggagaaaatgagggcgaaacagccgtattaacaggaatggcacccgtttcagaaatgcgtgaatatcagaaggatgtggctgcctataccggaggcacaggacgattgttctgtacaatggcgggctattatccttgccataatacggaagaagtactggtggcatcagcctatgatccagagcgggatctggcaaatccgacggggtctgtgttctgtgcccatggtgcaggatttgtagtgccatggtatgaagtggaagattatatgcatctggaaggcgccggactggatggagagacggcaggtgctgaggatgaggatacggtggtgacagcaaaagcgaaggctgccagaagccgaaacattgcaccgtctctggcggatgataaagaactggaagctatttttgtcagaacatatggtgaaattaagcgacgaaagccacagaaagaacgtacattcagaggagcggatacaagttattcagaagtatcaggctcttcagggaaaatgacaggtgggttgagtgattcatccggtaaaggcagctggcgaggcgaaaagaagcagcaggagaacagacggcaggcgaccgcacaggaaagctatctgcttgtggacggttataatatcatttttgcctgggaagatctgcatgaattgtcggaacatagtatggacgctgcacgcaacaagttgatggagacattgtccaactatcagggctatacaagccagagggtgattcttgtttttgatgcctataaagtggagggatttccgggtgaagtgacaaagtggcataatattgatgtcgtttttacaaaggaggcagagacggcagatcagtatatcgaaaagacggcccatgccatcggaagaaagtataaagtaaccgtggcaacatcagatggccttgagcaggtgattatccgaagtcaggggtgccttttgatgtcagccagagaattgcggcaggaaatcgagaggataaaagtcgaaatccgccgtgagcatctggagaagaatcaggagagaggcaattatctgctgaattatcttccggaagaagaggccgggcggatggaagccatccgtcagggcctgatatcagcagatgaagcggatgcggacaaaaggcgccgctga

SEQ ID NO: 2815 - DNA, 3471 bp, Coprococcus catus
atggattttacacatttgcacgttcatacagaatacagtctgttggatggctccaataaaatcaaagaactgatcgccagagtcaaggaacttggcatggacagtgtggccatcacagatcacggtgttatgtatggtgtgattgatttttataaggaagcacagaagcagggcattcatccggtcatcggctgtgaggtttatgtggcaccgggttcacgttttgacaaaagcggcaatatgagcagcaacagatatcaccatctggtattgcttgcggagaatgataccggttatcataatctgatgaaaattgtatccaaaggttttacggaaggcttttattataagccccgtgtagataaagaacttttaaaagaatatcatgaaggcatcattgctctcagtgcctgcctggcaggagagattccagatgcattgagaaaaggcctgtatcaaacggctttgaatgcagcacaggaaatgtcagaaatcttcggtgaagatcatttttatctggaattgcaggatcatggcattccggatcagaaaacggtgaatcagggattgcttcggctggcgaaagatacaggccttgaattggtagcaaccaatgatattcattacacattggccgaagatgctcaggcgcatgacgtattgctgtgcatccagacaggcaagaaagtggcggatacggatagaatgcgttatgagggcggtcagtattatgtcaaatcaccggaagagatggcatcgctgttcccttatgcccgtgaggctatcgagaatacgcacaaaattgccatgcgatgccatgtggatatcgagttcggtcattacaaactgccggaatttcctgtgccggaagggtacgattcatgggaatatctgcagaaacttgtctgggacggtttttatgaaagatacccgcaggcggatgagaagctcaaagagcgtgtcagctatgaattaaataccatcaaaaccatgggattcgtggattatttcctgattgtatgggattttattcattatgccaaagagcatgacattatggtcggaccgggccgaggttcggcagcaggaagcattgtatcctactgtctggatattacaaccctggatccgattcgctacaatttactctttgagcgattcctgaatccgaaccgtgtgacgatgcccgatatcgacgtggatttctgttttgaaagacgacaggaagtcattgattatgttgtcagaaaatatggcaaagagcgcgtggtgcagattgttacatttggtacaatggcagcgcggggtgtgatccgtgatgtggggcgtgtcctggatctgccttatgccatctgtgatagtgtggccaagatgattccgaatgagcttggtattaccatcgataaggcgctgaagatgaatccggagctgaaaaagctctatgacggggatgacagtatccacaatttgattgatatggcaagaagactggaaggcctgccgcggcatacatccatgcatgctgccggtgttgttatcagcccgaaggctgtcgatgagtttgtaccgctgtcgagaggcgcagacgatgtgatcacgacacaatacaccatgaccacgctggaagagctgggactgctgaaaatggactttctggggctgcgtacactgactgttattcggaatgcagtgaagctgatcaatgcagacggtcggcatcatgtggacatgcatgagattgattacaatgacaaggctgtttttgatatgatcggaacaggaaaaaccgacggtatttttcagcttgaaagttcaggaatgaagagcttcatgaaggaactgaaaccccataatctcgaggatatcattgcaggtatttcgctttatcgtccagggccaatggattttattccgcgttatatcaagggaaagaacgaaccggcgtccatcacgtatgagtgtcctcagctggaagagattctggaaccgacctatggctgtattgtctatcaggaacaggtcatgcagattgttatgaaactggccggttatgatctgggacgaagcgaccttgtgcgtcgagctatgtcgaagaaaaaagcggatgtgatggcgaaggaacgccagtactttgtgtacggcaatgatgaactgggtgtgcccggctgtattgccaacggtattgatgaggcgacggccaacaggatctttgatgagatgacggattttgccaagtatgccttcaataagtcccatgcagcagcctataccattgtttcttatcagacagcatggctgaaatactactatccggtagagttcatggcggctctgatgacatctgtcatcgacaattcagtgaaagttgcagaatatattatgacctgcagacagatgggcattaagatactgccgccggatattaatcatggcgtcagcagtttctctgtggacaacggcagaatcctttacgggctttctgcggtcaaaagtatcggaagaccggtggtggcagccattgaacaggagagaaccctggcgggaccatttacaagcctgaagaatttcattgagcgtatgagcggcaaggaagtcaataaacgttccattgagaattttatcaaggcaggtgcctttgacagctttggagccacaaggcggcagcagatgatggtttatgcgcagattatggatcaggtggctcaggacagaaagaaaaatatcagcggtcagatgacattattcgatttcatggacgaagaagaaaaacaggcttttgagattcgttatccgaatgtgggtgagtatgacaaaggcaccctcctttcctttgagaaggaagtcctcggggtatatatcagcggacatcctctggatgatgtggctgagagttggcgcagaaatgtcacggcggtgacctccgatttctatgtcaatgaggaaagcggtatgccgaatgtggtcgatcagtcattggtggtcattggcggtatggtgacgggcaaaacagttaaatcaacaaagaacaataagatgatggcttttattcagttggaggatctgctgggaacagtagaagtcattatttttccgaatgattatgagaaataccaggctgagctgacagaggaggcgaagctctacatcaagggccgtgtgtctgcttcggaggatcagcaggcgaaactgatcgcggagaagatcattccttttgataaggtgccaaaggaagtatggttgcagtatccggacaagaacagctttatcggacagcaggaaaccctgtacaaaaccctggcggggcattcgggtaatgaccgggtcatcatattctgtaaagtggaaaaagccattaagaaactgcctgtatcatggaatataaaggcagaggaagaaattcttgaccagcttggaacagtattgggaaaagaaaacgtaaaagttcgggaaactgtcttgaaaagcttctaa

SEQ ID NO: 2816 - DNA, 2571 bp, Coprococcus catus
atgcagcaatttattgtgacaggtatgagctgtgcagcctgcagtgcccgtgtggagaaagctgtctcgaaggtggagggggttacctcctgttcagtcagtcttttgactaattccatgggtgtggaagggacggcagctgatcaggcgattattcaggcagtggaagcggccggttatggagcctccgtgaagggtgaggctgcagagcattcaggggcttcatcgatggcagctgaggaggagatgctgaaggatcatgacacaccggttctgaagcggagacttctggcgtcgctgggatttttgattgtactgatgtatttttccatgggacacatgatgtggggatggccgctgccggcattttttgagaacaaccatatagccatggggcttgttcagctgctgttgacagggattgtcatggtcatcaatcagaagtttttcatcagtggttttacaagtcttgcgcatcgtgccccgaatatggatacgctggtggctcttggctctacggcggcttttggatacagtacgtatgcgttatttgccatgacagatgctcaggtgaagggcgatatggagatggtcatgcattatatgcatgagttctattttgaatctgcagccatgattttgacactgatcacagtgggcaagatgctggaggcacactcaaagggcaagacaacagatgcactcaaagggctgatgaaactggcttcgaagacagcggttgtggaacggaatggtcaggaagttactgttccgattgagcaggtgaagaaaggagatatattccttgtacgtccgggagagaatgtgccggtggatggtgtgatcctggaaggaaccagtgctttgaatgaggcggctttgacaggtgaaagcattcctgtggacaagaagccgggggatgtcgtatcggctgcaaccttgaatcagtcaggatttatccgctgtgaggccacccgtgtcggtgaagataccacattatcccagattatccagatggtcagtgatgcagcggcgacaaaggcaccgattgccaagattgcagataaggtttcaggtgtttttgtaccggcggtgatcaccattgcggtcattacgatgatcgtgtggctgctggcaggagaaagtgttggttttgctttggcgaggggcatttcggtactggttatcagctgtccgtgtgcccttggtcttgccacaccggtggcgattatggtgggcaatggtatgggtgccaagaatggtatcctctttaagacagctgtttcactggaagagacaggcaaggttcaaattgttgccctggataagacaggtaccatcaccaacggtgaaccggttgttacagatatggttcctgcggagggtgtgacagaagaatcattgcttgcgttggcagccagccttgagaaacgcagcgaacatccgttggcaaaggcaattttgaaatatgtcggagaacagcagctgattgtagaagacgtttctgagtttgaagcacttccgggcaatggactgacagctgtcagaaatggtgtcaaattggccggcggcaattatgcatttatcagaacccagacggaagtgtcagaggatttgctgaaacagtcagaggcattggcggaacaggggaagacaccgatgtttttctcagagaatggcagattggccggtattattgccgttgcagataccatgaaggaagacagcaggcaggctgtcagtgaacttcggaatatgggcatccgggttgtgatgctgaccggcgacaatgagagaacagccagagctatcggcgcacaggccggtgtggatgatgtgattgccggtgtgcttccggatggtaaagagagtgtgatccgaaagttgcagcaatatggcaaggtagcgatggtgggggatggtatcaacgatgcgcctgcactgacaagagctgatatgggtatcgccatcggtgccggtacggatgtggccattgatgctgctgatgtggtgctgatgaagagccggctcagtgatgtggcagccgctgttcgtctgagccgtgcaaccttaagaaatattcatgagaatcttttctgggcatttttctacaacgtgatcggtattccgctggcagcaggtgtgtggatcccgattttcggatggacattaaacccgatgttcggtgcggcggccatgagcttgtccagcttctgtgttgtcaccaatgcactgcgcttgaacctttttaacatgcatgatgcaaaaaaggacaaaaagttgaaaaatcctgctataataaaagaactggtggataacaataaaaccaatcataatcaagaaaataaggagataggaacaatgaagaaaacaatgaaaatcgaaggtatgatgtgtggtcactgtgaagcaactgtcaagaaagcactggaaggccttgatggcgtgacatctgcggaagtcagccatgaagcaggtacagcagtcgtagaactctcagcagacgtagcagatgacgttctgaagaaaacagtcgaagataaagactacaaagtaacagccattaactag

SEQ ID NO: 2817 - DNA, 2976 bp, Coprococcus catus
atggcgggaaagcagagcagtgaagtcaaacgccgtactgcatcgaccagaaaaacaactacaacaaggaaatcatccgccggaaagaagcggaacacatccgggaaatctgccaatacaaaggcatcgcgcatgcaagtcagtgaatatacagaacctgtgggagatgagatcaaattgatcattatccttgcagtttcaattctcatcttactcagcgtgtttggccttggcggaagagtcggagacaaagcagcctatctcttttttggccttttcggatttgttgcttatgcgcttccttttcttctttttatcggcagcgcctttcacatatccaaccgcggcagtcgtcttgcacggattaaattgacagcagccactgttttcctgattatgatcatggcattgatggcactggctgatagttcttttgacggcacagcctctgtactggatggttttctcaattcagctgctgctcacaacggcggcggtctgatcgggttcagtctgagctgggttcttttcaatgcctttggacgtgccggatctaccgttattcttgtatgtctgatgctggtttccggtgtattgattaccggcaaacggatttttatccgcctgggcactttaatcggacatatgatgaccgatatgggacagcacttcaacgcatggcgtgagaaacaggcccgcgaacgtcttgcccgtatggaagcgaaggcagctgaagaagacagcctgcctgaggatgaagcatatgaagatattgatgaagaaaccgtttccatacagcctaagaaaaaggcagccaatatcattatcccgtcaaggaaaaaggaaaatgtcaagtccaaggatcctgcaccggcatcttcatcagaacccgttttgcagacttataccgaagagtcagcttcatccgctgagacagcggtcatttctgacgattccaaacaaccgtcccttgacagttttgatcagggacagtctgtccagccgttgcatattcagattcctgaatttatgaccggacatgtttccggcaaatcttctgtaaaggcaccttctgcttccatatcagatatcatgtccaacctgagccgggatatcccatccgaagcggaatcagaaccggagactgagactgtcgaagacaaaaatccaaaaggcaagccggtcattgccagaactattttgtctcctgatgatctggagttggaaatagaaggattgccggaggaaacaccggttaatacagacgatacatttatcgatatctccaagattctgtccgagattcctgaaacaacaggaaacatcaatacagaagtggcggacatgcaacctgaggacgtttctccggctgcacaggccgaacagcagacagctgtatcaccgacagccgcccgcacttcatccccttcgcatcatacaactgcgaaaggaactgtagaggatacagcttccggttctgatgaaccccttgaaattgtagaagaggagattgaaaaatacgaattcccgccactggatcttcttgatcagggaaaaggcagcggcaatcaacagacagccgcatccctgaaacagactgcgctgaagcttcagcagacatttgaaagttttggtgtaggtgtccaggtaaccaatgtcagctgcggtccggcagttaccagatatgaactccaaccggatcagggtgtgaaagtcagccgtattgtcagtctgtctgatgatatcaagctgaatctggcagttgcagatatccgaattgaggcgccaatcccaggcaaagcagccgtcggtattgaagttccgaatacccacaaggaaatggtgcatctgcgtgatcttcttgagtccgacaagtgtaagcaggcaaagtccaaactggcttttgccgtgggcaaagatatcggcggccagacggttgttgctgatattgaaaagatgccgcatttgctgatcgctggtgcaacgggttccggtaaatccgtctgtatcaatacgatcattatgagcattctcttcagggctgatccgaatgaggtcaagatgatcatgatcgacccgaaagtggtggaattgaatgtttataacggtctcccgcatctgttgatccctgttgttacggatccgaagaaagccgccggttccctgaactgggcagtaaatactatgatggaccgctacaataaatttgccgaaatcggtgccaaagacttgaagagttataatgcccgtgtggagaatctcccatacgaaagtgaacagcacaagaagatgccgcagattatcattatcatcgacgagctggcagacctgatgatggtcgctcaatccgaagttgaagatgccatctgccgactggcccagctggcccgtgcagcaggtattcatctgattattgccacacagcgtccatctgtcaatgttattaccggcctgatcaaagccaacgtaccgtcacgtatcgctttctccgtatcctccggtgtcgattcacgcactattcttgacatgaacggtgctgagaagctgctgggaaacggagacatgctgttctatccacagggcctgcagaaaccggtccgcgttcagggtgcctttgtttctgaaaatgagattgcgcgtgtcactgattttatccgtgcccatctcaccagtcaacctgtatacagtgagacgattaaaaagagcatagagacagctgccatcagcagtccttccggcgcatcaggcagtgacaaagatgtttattttgaagaagccggccgtttcatcattgaaaaagataaggcgtccatcggcatgctgcagcgtgtctacaagattggttttaaccgtgctgcccgtattatggaccagctctgtgaagccggtgttgttgggcctgaaattggcaccaaaccgcgtcagatcaagatgacgatggaggaatttgaaacttatctcaatggcaatcaatag

SEQ ID NO: 2818 - DNA, 2601 bp, Coprococcus catus
atgaatatggatttaaataaatttacacagaagtccctgcaggcagtgcaggattgtcagaaactggcttatcagtacgggaatcagaagattgaacaggaacatctgcttctgagcctgctgacccaggaagacagcctgatcgacagactgctggcgaagatgggaattaatcatgaaggatttaaggtacaggcgacgaagcttgttgagaagcttgtcaaggtatccggcggccaggtttatgtaggtgataacctgaaccgtacactggtacgggctgaggaagaagcgaagcagatggatgatgaatatatctctgttgagcaccttttcctggcattgtttgagacagccgacagtgatatcaagacattattcaggaattttgaagtaacaagagatggtttccttcaggcactttccactgtccgaggtaatcagcgtgtgacaagtgataaccctgaggcaacttatgacagcctgagtaagtatgcagaagatttggtaggcaaggcaagagcccagaagatggatcctgtcattggccgtgatacggagatccgtaacattatccgtatcctttctcgtaagacgaagaacaacccggtactgatcggtgagcctggtgtaggtaagaccgcagttatcgagggcctggcacagcgtatcgtcaagggcgatgtgccggatggcctgaaggacaagaagatttattctctggatatgggcgcactggtagccggtgccaagtacagaggtgaattcgaggaacgtctgaaggctgttcttgctgaggtcaagaagagcgacggcgagattattcttttcatcgatgagctgcatctgatcgttggtgccggcaagacggacggtgccatggatgccagcaatatgctgaagcctatgctggccaggggtgaactccactgtatcggtgcgacaacactggacgagtacagacagtacattgagaaggataaggcgcttgagcgtcgtttccagccggttatggtggatgagccgacggttgaggataccattgccattctccgtggactgaaagagagatatgaagttttccatggtgttaagattacagatggtgcccttgtggcagctgcaacgctttcacatagatacattaccgatcgtttccttccggataaggcgattgaccttgtggatgaagcctgtgcaatgatcaagacagaacttgattctatgccgacagagttggatgagatttcgcgtaagatcatgcagttggagattgaggaagccgctctgaagaaagaggacgacaagctcagtcaggaacggttgcagaacattacccatgagattgccgaactgagagaagatttcaaggttcagaaggctaaatgggacgatgagaagcaggatgttgagaagctgcagagcctgcgtgaacagattgaagacctgaacaagcagattgagttggctcagagaaattatgatctgaacaaggctgctgaacttcagtacggcaagctgcctcagctgaagaaacagctggaagaggaagaggcgcgtgtccatggagaagagaattctattcttcgtgaacgtgtcactgatgaagagatttccagaatcgtgtccagatggacaggtattccggttgcaaagctgacagagagcgagcgtaataagatccttcacctggacgatgaacttcacaaacgtgtcatcggtcaggaagaaggtgtatcgaaggttacagaagcgattatccgttccaaggcaggtatccaggatgagaacagaccgattggttcgttcctgttccttggccctactggtgttggtaagacagaacttgccaaggcactggcagagaatctgtttgatgatgagaacaatatggtgcgtatcgatatgagtgaatacatggagaagttctccgtgtccagactgatcggagcgcctccgggatatgttggttatgaagaaggcggacagctgacagaagcagtcagaagaaaaccttactctgttatccttttcgatgagattgagaaggcccatccggatgttttcaatgtattgctgcagattctggatgatggtcgtgtgaccgattcccagggcagaacggtagactttaagaatacgattctgatcatgacgtcaaacattggttcttcctatctgctggagggcattgacagcgaaggcaatatcagtgatgaagcaagacagaacacgatgaatgatctgaaagcacatttcagaccggaattcctgaaccgtcttgatgagatcattatgttcaagccgttaacgaaggacaacatcagcggtatcattgatatcctgatcggtcgtctgaataagcgtcttgagacaaaggaactgacacttcagctgacaccggctgcaaaggattacatcacagatcatggttatgatccggtttatggtgcacgtccgttgaagcggtatatccagaagaatgtcgagaccatggtagctaaaatgatccttggcaatgaattggagccgggcgactgcatcaatgtagatgctgatgccaatggcctcacaacaaccacaacacatattgaagactaa

SEQ ID NO: 2819 - DNA, 2142 bp, Coprococcus catus
atgatagatattgaagcaaaactgagcagtgaactgggtgttgaaaaatggcaggtgacagctgcagtacagttaattgatgaggataataccattccttttattgcccgctaccgaaaggaaaagacaggggcattaaacgatgaagtgctgagaaagctttatgaacggctgatctatctgagaaatcttgaagataaaaagcagcaggtcattgcgaccatccgtgatcaggggaagatgacagaagctttgctgaaacagatcgaggaagctcagacacaggtggttgtggatgatttataccgtccatatcgtccaaagcgccgcacaagagccatgattgctaaggaaaaaggccttgaaaagctggccgtagcggtgatggcacagaatctcggacatccggttgaagaagaagctgccgactatgtgtcagaggaaaaaggtgtggcagatgtcaaggaagctttagagggcgcttcggatattttggcagagagtatcgcggatacagcggcttatcgtatgtggatccgacagcagtttgaaaaagagggacgtcttgtatctgaagcaaaggatgacaaagaaaaatctgtctatgaaatgtattatcattttgctgaaccggtatccaaaattgcgggacacagagtgctggcgatcaaccgtgcagagaaagagaagatggtcaatgtaacgattgaagtgccggaagagaagctgattggctggctgaaaagacaggttgttcatcagaagaatccttatacaacagaaatgatggaagcggcagcagaggatagttatcgccgtctgatcgcaccagcggtggaacgtgaagtaaggaatgccctgaccgaaaaagcagaagaaggcgctatgactgtttttggcaagaatctgaagcagctgctgatgcagccgccaatcaaagggcagacggttcttggctgggatccggctttcagaacaggatgtaagttggcagttgtggacccgacaggcaaggtgttggatacggttgttatttatccgacagagccgcagaagaaaattgatcaggcgaaggaagttcttcgaaaacttgtcaggaaatatggtattacgctgatttcccttggaaacgggacggcgtcaagagaatcagaacaggtcatagtagattttctgaaggaaatacctgagaaagtggcttatgtgatcgtcagcgaggcaggcgccagtgtttattcagccagcaaattggcgacagaagaattccctaattttgatgttggtcagcgaagtgcggcatctattgccagaagacttcaggatcctctggctgaactggttaagattgatccgaaggccattggtgtcggtcagtatcagcatgatatgaatcagaagaaactgtccgaagttttatctggtaccgttgaagactgtgtcaataaagtcggggtggatctgaatacggcctctgcgtctcttcttgagtatatttccggcatcagcaagactgtggcaaagaatatcgtggcatatcgtgaagaaaacggacgttttgacaacagaaaacaacttttaaaggtgccaaaactgggaccgaaagcctatgagcagtgtgcaggtttccttcgtatcagcgatggcagtcagccccttgataatacgggcgttcacccggaatcctatgaggcagtcgagaaattactgtctgaactgggcgtggaaccggataagctgcgtgaaggcagccttccaattcgaattgaagattatgagaagatggcggcaaaattatccatcggagaaatcaccctgcatgatattgttcatgaactgagaagaccgggaagggatcctcgagaagatatgccgaagccggtactccgtacggatgtcctggaaatgaaagacctgaagccggggatgattttaaaaggaaccgtcagaaacgtgattgactttggtgtgtttgtggatatcggtgttcatcaggatggtctggtgcatatttcacagctgacaaataagaaatttgtccgccacccgatggaaatagtcagtgtcggtgacgtggtggaagtcaaagttatgtctgtggatcttgcaaaaaaacgtattcagttgacaatgattcttgattga

SEQ ID NO: 2820 - DNA, 2604 bp, Coprococcus catus
atgggaattttcagcaagattatgggtacacacagtgagagagaactgaagagagtatatccaatcgttgataaaattgaagccatgggtcctgctatggagaagttgtctgatgaagaactgagagcgaagacagatgagtttaagaagcgtctgtctgaaggagagacattggatgatcttcttgtggaagcttatgcagttgtcagagaagcagcaacccgtgtacttggcatgcgccattacagagttcagctgatcggcggtgtgatcctgcatcagggtcgtatcgctgagatgaagactggtgaaggtaagacattggtatctacattgccggcctatttgaatgcacttgagggcaagggtgttcacattgttacagtcaatgactacctggccaaccgagatgcagagtggatgggtgaagttcatcgtttccttggattgagtgttggcgtcattttgaacagtatgaatccggacgagcgtcgtgcggcttatcagtgcgatattacttatgcgacgaacaatgaacttggctttgattatctgcgtgacaatatggcagtttatgagaagcagctggtacagcgtgaattgaattatgcgatcatcgatgaggtggactccgtattgatcgatgaagccagaacaccgctgatcatttcaggtcagagcggaaagtcaacggcactttacaacacctgtgattatctggccaaacgtatgacaaagggtgagcgtaagggcgagatcaacaagatgacagtcatgatgggcgaagaaattgaagagaccggtgatttcattgtcaatgaaaaagagaaacatgttgttctgacagaacagggtgtcaagaaggtagaggagtattttcatctgaacaatctggctgatgctgataaccttgagatccagcatgttatgacattggctcttcgcgccaattatctgatgttccgtgataagaactatgtggttaaggatggagaagtactgatcgtcgatgaatttacaggtcgtattatgccgggccgtcgctattcagatggtctccatcaggcgattgaagcaaaagaaggtgtagaagttaagagagagagccgcacgctggcaacgatcacactgcagaacttctttaataaatacaacaagacagccggcatgaccggtactgccctgacagaagaggaagagttccgtgagatctatggtctggatgttatcgagatccctccgaataagaaggttattcgtgtggatcatgatgatcttgtattcggtacacacagagagaagatcaatgccattgttgaagagattattgagacacataagaagggacagcctgttctggttggtacaatcaccatcgaaggctctgaagaaatcagcaatcgtctgagaaaagaggggattccgcataccgttctgaatgcgaagttccatgagaaggaagcggagattgttgcacatgccggtgaaagaggtgcggtgaccatcgccacgaatatggccggtcgtggtaccgatatcaagcttggggatggtgtggctgaactgggcggtctgaagattatcggtacagagcgtcatgaatcaagacgaattgataatcagcttcgaggccgtgccggacgacagggagatccgggtgatacaagatttttcatttcccttgaagatgatctgatgcgtctgtttggttctgacaagatgatgaaggtattcaatgcactgtctcatgaagatggtatggcgattgaacacaagatgctttccaatgctgttgagaaggcacagaagaagatcgagtccaacaactttgctattcgtaagaacctgttggaatatgaccaggttaacaatgagcagcgagaattgatctatgaagagcgccgccgtgtcttgaagggcgagagcatgcatgatgagattgtccgtatgatcggagatgttgttaaagcggagatcaatgatgttattgatgaaggtcagacaccggcagagtggaatcttctgctgctgaaccgtacattgcttccaatcgcaccgattaagccactgtccatgaacaaggatgattataaaggctatacgacagaacgtctgatcgatgaagtgacagaacaggtcaaggaactgtatgcaaagaaggaacaggagataacagaggagacgggctctgcagagacattccgcgaagtagagcgtgtattcctgctgaaagtcattgacaataagtggatgagccatattgatgatatggatcagttgcgtcagagtatttctctgcaggcatatgcacagaaggaccctgttgtagaataccgttatgcgggtattgagatgtttgaagagatgattgctgcgatttccaaggatatcgtgatgatcatgctgcacatccgcaagaaacctgaagtggagcgcaaacaggaagtgaaggtaacaggaacgaacaaggatgattccggtccaaagaaacctgttcagagaaagaacaagaaagttcagccgaatgatccttgcccatgcggcaagtgctatccggatggacgcccgattaagtataagaactgttgcggacgcaatcagtaa

SEQ ID NO: 2821 - DNA, 2313 bp, Coprococcus catus
atgaaggacgataaaaaagaagtaatgggcactgaagagccatttgaggagcaggagctcattcatacacaggatttcgaatcaccgaaggtgctgtatcagcgcctgatcaataaagtgaaggaatatcatccttcagatgatatcagtatgatcgagaaggcatataatattgccaataatgcgcacaaggggcagctgcgtaagtccggagaaccttatattattcatccgctctgtgtagccctgatcctggcggatcttgagctggataaggagaccattgtcggcggacttcttcatgatgtggttgaggacacgatcatgacggaggaggatatcacgagagaattcagcgcggagatcgcactgatcgtatccggtgtaacaaagctgggacagttatcctattccaaggataaggtggagattcaggcagagaatcttcgtaagatgtttctggctatggcgaaggatatccgagttatcctgatcaagctggcagaccgtctgcacaatatgcgtacactgaagtatatgacaccggccaagcagaaggaaaaggccagagagaccatggatatttatgcaccgatcgcccagagacttggtatttccaagatcaagattgaactggatgatctgtcattgagatacctggaaccggaagtgtattatgatctggccagacagatcaatctgaagcgcagtgagcgtcaggcttttgtagatgccattgtggaagaagtcagtcagcatatggcacagagcggtatcaaggcacaggtgaatggccgtgttaagcatttctttagcatttacaagaagatggtcaatcaggacaagacattggatgagatctatgatctgtttgcggtgcgtattattgtggatacagtgaaggactgttatgcggcccttggtattattcatgagatgtacaagccgattccgggtcgttttaaagattatattgcaatgccgaagcagaatatgtatcagtccctgcatacaacactgatcggtccgaacggacagccttttgagatccagatccgtacatttgacatgcacagaacagctgaatacggtatcgcagcccattggaagtacaaggaagatccgaatgccaagaatgtagaggacagtgaggaagccaagctgacatggctgcgtcagattctggaatggcagacagatatgtcggacaataaggaattcatgagccttttgaagaacgacttgaatctgtttgcagacagtgtttattgttttacaccggcaggtgacgtcaagaatctgccgacaggttccacaccgattgatttcgcttacagtattcattcagcggtcggcaataagatggtgggggcgagagtcaacggcaagctggtcaatattgattatgtgatcaagaacggcgaccgtgttgaggtcctgacatcagccaattccaagggaccaagccgtgattggctaaatattgtcaagagtacgcaggccaagaataagattaatcagtggttcaagacggaattcaaggaagagaatattatccgcggtaaggatatgctgaatcgttactgcaaagcgaaagagatcattctcagtaatttgctgaaaccggaatttatggagaaagttatccgcaagtatggtttcaaggactgggatgcagtcaatgctgctgtgggtcatggcggtttgaaggaaggccaggttatcaacaagctgcttgaggaataccagaagaagcagcgaaaagagatgacagataagcagcttctgacacagatgactgagatgaagcagaaaccttctgcagccgtacagccgcataagaaaggcagcaagagcggcattattgtcaaaggcatcgatgatgtggctgtccgtttctcaaaatgctgcaatcctgtaccgggtgatgagatcgttggctttattaccagaggcagaggtgtgtccattcatcgtacagactgcgtcaatatgctgcatttatccgagatagaaagacagcgcctgattgatgcagaatggcaggacagcacggctgacggccagggcggcctgtataaggcagaactcaatgtttatgttcatgacggagtcggtgtgctgattcagatcgcacaggtattctcagagagggatatcaatgtgacagccatgtccagccgttcaggcaagaataatacagcgaccatcaatatcagctttgatattggcggcaagtatgctttaaataagattatagacaaactgcgcagtctggactgcgtttatgatatcgccagaacaactggctaa

SEQ ID NO: 2822 - DNA, 2247 bp, Coprococcus catus
atggaataccaagttttagataaggagaaggacagaatggctagaaagaaaaagaatgatttctgggatgatgtagaagatttgaatactgtttcagataatgatcagaccggagatgatgatacagcagaagttgctgtggatgaagaatggtcagctgtaaagagccttccgctgaaggtgatcatgcgttttctgctgatggtatcgtgtctggtggcacttgtgtcagcctatatcgcttatgaatatgtgaatgatcgttatgccggcggcagctacagcacagatttctttgacagtgcaagttttgcagatgaatataacaagagtatggatcagcttttgcaactggtacaggcaatggaggcagatccttctgtgacccaggcaggcaatgaagaactgctgacaacgcttgttgagaattatatgggcaaggatacgaacttctcatttatgattctggacagtgacaagtatcgtattgctgccagcggtgacgatgcgaaggatcgtattgaaggaagcaatcactatgtggctatttccaatgcggatggccagaccagcattcagagcccaattgcaggtaaacttctgaacaaggatgcatggacgaaggtcctttcggagaccagcaataagtatattatatattcagctgtcgataataccctggcacagccggattcattttacaaggcagagctgtcattcgagaaaatgggtgaatattttggtgctgcaagatttgttggcatcatagcagccgtcatttttgtcatttgtctcattttctgtattatgtcaacaggtatgaagcgtggctacgacggtgtttgtctgacatggtgggacagagtctttacagagattgcactggtggtgatgattgcagtggcaattgccctgggtattggtgttcgcaagctgatgaagatggatggggatctgtatcattatggtgcagcagcactggcaattgtgacttatggatgggtgatccgttcctatttcagtattgtcagacgtatcaaagccggacgtcttctcagatgttccattatcggaacgattgtgggcggtatcagccgcggtattggcaagttgccgtctccattgaatgtgattgttggtgcagtgatcctggttgttattaacggtggattgatttatggggttatcttcatgcgtcagtatacagttaagggtattccggttatgtttattgcagcgcctgttatctttatcatagaattgcttgcattgcttgtacatagtggcggaagtgatgatgaagatgacgaagtcgaggaagagacagaacaggaaccggttgatgaagaagatgatgttagaattgcagcagcacctggaagaaagaatacacaggttcaggagactgagcgtgtgcagaatacaccggcgaatgatgaaccgatggattgggaagcaatggatcttggcaaggcgattgcggaagcagagcgcagccagacccagaagagacagaatacatctgcagatattctcagtgagcagacggtactgaatgtgcaggatgacatggccgaaggaatgactggctatgtggcatctaatgttgtggatgtaacagacggaaagacagaagttctttctgttgaggatgtagagaaagctatcagagaatcaggactgacacctgagattcagccgcgtccacaggcacagccggttcagacagcacagacggtaagacctgctgaagaaacagttgtgaatatggcacctgtgaaaccggtgaaagaacagccgacagcaaaacagccaattatggaagcagcagatgacggcagagtgaattttgtacagctcaacaaggatgtccgtaaggaattcagagcagcactcaaggccagaggtgtcggcgtcacagtgcgtgcgccggagaaaccggtgattattgatatcgacagaaacagtctgaagatgattattacagatatctttacacagattgagcgtttctcagcagacaatgagcgtgcatacgtggaagtttatcgtcaggacggcaaggtggtttacattgtgaagattaccgttgctccggataagacggaagaagcggtcaaggccgctaccggtgacaacagttttgacaatgcaagaaagattgttgaagcgaatgcaggacgttttgttgtggcgtttgataatggcatgatgaaagccggcatgatgattgatgctgcggaataa

SEQ ID NO: 2823 - DNA, 2940 bp, Coprococcus catus
atgacagacaaatttactcatattccggcggcctatgaaatcgtcagtctggaatatatagatgagatcaaatcccaggcagcactgctcagacacaggaaaaccggtgcaagaatcgctgttttggctaatgatgatgaaaataaaaccttcaatatcggtttcagaactcctccaaaggacagtaccggcgttgcccatattatggaacactcggttttgtgcggttcagagaagtttcctgccaaggacccttttgtagaattagcgaagggctctcttaatacatttttgaatgcgatgacctatccggacaagacggtttatcctattgccagctgcaatgatgcagattttcagaatttgatgcatgtctatctggatgccgtttttcatccgaatatttatattcatgatgagatcttcagacaggaaggctggcattatgagttaacagacaaggacgcaccccttatttacaatggtgttgtctataatgaaatgaagggcgctttttcagcacccgaacagattttatatagaaagatcaccgatacactgttcccggacaccatctatagtgtcgagtccggcggtgatccggatgtcatcccacaactgacctatgcgcagtttctggatttccacaggaagtattatcatccatccaacagctacatttacctgtatggcaatatggacgtggcagagaaactggcttttattgatgaagcatacctgtgccaatttgataatacccgggtagattccgctattgcaaagcaggctccatttgcccacacttctgtcacccgtggtgaatacccgatcggcaatgatgacagagaagacaatgccgcttatatggcatacagctgggtcgttggtgacagccttgatgccaagctttgccttgggtttcagattcttgaatatgcactgatggaagctcccggagcacctttgaaacaggcgcttttagacaaagactttggggaagatatctatggtatgttcgagacaagtttgatacagccatatttgtccattatcatcaagaatattaatgaagaagacagagatgaaattgttcaggtgatccaaactgaattagagaagctggcagatggcgggctgaaccacaaaacacttgaaggcgccttgaattattatgaatttaagtcaagagaaggtgatttcggccgctggccaaaggggctgatgtacggattacagttaatggacagctggctctatgatgacaataagccttttgttcatctgaaattccaggcagtttatgatgaattaagagagggcctttccaagggatattttgaggacttgatccgacactatatgattgataatacccactgttctgtttatctgctttgcccatctaagggactcgcagcaagaaaagagcaggcattggctgatcagctggcagaatacaaggcttccctttcagaggaagaactggagcagctcattgcagccaccgaagaattgaagcaatatcagagtgaaccatcgccaaaagagatccttgaaatgatcccgctgctgacaattgatgatatccgcaaagaggctgaacctatctacaataaggtgttgtcggaagaaggtattgctattctgcagcacgaaattgaaactaatcgaattgcttatgttgatctgctgtttgatatttcccatatagatgtggatgaggttccttatctcggcatattgacagaagttcttggcaatatgaacacagatcactatacctatcaggaactgacagatgaggtgaatttatataccggcggtcttcggacagcagtgaacatttacggtcttcagggcagtgatacttataagccacgatttgaaatgtccggcaaagtcctgtacagcaaagtgccaaagatgtttgaattatttgaagatattttacttcatacccattttgatgatgagaagcgtctgagagagattctaaaccagctgaaatcccgtctggaaatgggctttatgtcaaatggtcattcaacggctgtaaacagagccatgtcttatttcaaccagggcagctggtacaaagaactcgtagaaggcattgctttctatcagttcttgtgtgcgatactgaaagattatgacaccagaaaaacagaaatcattcataaattgcagacaatcggtcagaagattttcagaaaagcataccttatggcggatatgaccgttgatcatgaaggcatgcagatatgtacaaagccactcgtatcctttgccggcaagttgtacactgcgccgatgagcgctgtcgactgtgcagtcaaaaccatcggcacatgcccgagacacaatgaagcttttatcacatccggtatggtacagtataatgcctgtgtaggcaattttgggggatcaggtatggcttacagcggcagtatgaatgtgctgaagaatgtgttgggcaatgaatacctctggaataatgtcagagtcaaaggcggtgcatacggctgtatgtgtggttttgcgccaagcggcaatggttatttcacttcttacagagatccgaatcttgcaaagacttatgatatttatgcgaatgcagccgactatgtccgatctctggcattagatgacagagaattgacgaagtatatcatcggtgccgttggtgccatcgacctgccgatgacagcttctatgaagggaaaccgttcactggcagcgtttctcggggaacgcagttttgaacagatacagaagaacagagatgagcttcttgcaacaactgttgacgatctgagaggcctttcaaaggctgttgcgtcagtcattgaagccggtcatatctgcgttgtaggcagtgaaagcaagatcacagaagaaaaggaccgttttgaatatgtggcacagcttactcaatag

SEQ ID NO: 2824 - DNA, 1830 bp, Coprococcus catus
atgtctgttgatcgaactgaaaataaaaacgacaggaagggacttgcccaggtgggttactgcctcaaatatctgatgaattttttgcgtccgtataaaggcggcctgatccttggtctgctgatggttgtcgtggccaatataacatttgcggtgatgccggtggtggagggagagatgacaacacagctctttagtgacggggaagcgatactgaagggcgtggaaggtgcacatgtccattttgatgtgattttcggaatcatggggacgctggtgattatttatatcatcaaaacagtttctcagctgatcacggctgtttttctgacgcgggtgctgcagcaggccatgtgtgatatccgtaatgctttgcagaaaaagattcagcggctgccggtgcgttattttgatgatcatgcttttggggatgtactcagttgtgtgaccaatgatgtggatacgctgagcaatgcgctgcaggaaaccctgcagagagttctggcagcgattctgaccttcatttttgttatagggatgatgttttacattcacaccattttggcctgtatagcgattttgatcattccgctgtcactgatcgtgacccggttttttgtaacgagatcacagaaattatttgatacacagcaggaaacactgggggagctgaatggtacgatcacggagatgtacggcggttttaatgaaatcattttatataacaggcagaaaatggctctggataaatttcacgatgtgaatgacaggatgcggaaggcttcttttagggcacaatttgcatcctccctgatctcgccgtgtatttctctgatcacgtatctgattatcggttctgtggctgtaacgggctgtttgtttgtcatgaatggaacgcttttgcttggcaatcttcaggcctttgtccgttatatctggcagatcaatgaccctctgtcacagatttcccaattgtcttcacaggtacagtctgcctttgcggccatgggaagaatttttaatctgatggatgaggaagaggaagtacagaatggcaaagtcgagatccgaccggacaaagtccggggtgaagtcacttttgatcatgttgtttttgggtatgatgatgaaacattaatgcgggatgtgaattttcaggcgaagccgggaaagatggtggcgattgtaggaccgaccggggcaggcaaaacaacattgatgaatttgctgctgcgtttttatgatgtaaagggcggagctatcaaaattgacggtattgatatccgggatatgaacagggaagaactgagacagcttttttcattggtactgcaggatacatggctgtttaagggcagtatttatgataatattcattacggaaggctgacagccagaaaggatgaagttatttccgctgccaaaatggccaatgtgcatcattttatcaaaacactgaccggcggttacaactttgagatcaatgaggaaagcagtaatatttcacagggagagaagcagcttttgacgattgcaagggcgattctgaaagatccacggatcatcattctggatgaagcaacttcgtctgtggatacccgtctggagaaaatgctgcaggatgccatgcataaagtcatggacggcagaacatcctttgtgatcgcccatcgtctgtcaactgtcaaaaatgcggatctgattcttgtggttgaccatggtgatattgtggagcaggggactcatgaggaacttctggcgaaaaaaggtgtttacgaaaatttatatcacagcggcacatcacttgcgaatcatcagccagtgtgctaa

SEQ ID NO: 2825 - DNA, 1698 bp, Coprococcus catus
atgtcaacaaaagcttattatccactcaacgaaatcggtgccggaaaagttggtttttccaagacacgttctatcatcgaagctgccttctacggcaataatgttgtcaaagtcaacacattgaaagaagcttataatctggccaagaattcacctggtacgatcgtaacagatatgcctgtttacagaggtgaagaattcggtcttgacagtgatgcaagagtacttctgttcaatgacggtgccatcacaggccgttacgcaacagcccgacgtatcgcaggcgaacccggcgttgactgtgacgcactggacaaagttgttatggatgccgtttacacggcaaggttcaagaaattgtatcatgcaaccgtttacgcaggccttgaccctgaattcatggtgaagtgccacctgctgattcctgaaggtgaagagaacattctttacaactggatgctgaacttccagtatatgtccgatgactatgttaagatgtacaaagcttccaaacctgtcggcgacggcaaagaagcagatatctatattttttcagatccacagtggattccgaacgaagcacctggtgtcagccttgactgcttaagcgatcctgccaagaagacactctgctatttcaatacagagacaaactgtgcatgcatccttggtatgagatactttggtgagcacaagaagggcacactgacaatggtatgggccatcgccaaccgcaacggctatgcttcctgccacggcggccagaaggaataccttcttcctgacggctccaaatacgttgcttccgtttacggcctgtcaggctccggcaagtccactctgacacatgccaaacacggcggcaagtatgagatcaaagtcctccatgatgatgctttcattatcaatacagatacatgctcatccattgccattgaaccgacatatttcgacaagactgcggactatccgacaggctgcgctgacaacaaattccttctgacagctcagaactgctccgctacaatggatgaggacggcaagatccagcttgtcacagaagatatccgtaacggcaatggccgtgccatcaagtccaagctctggtctccgaaccgtgtggacaagattaacgcccctgttaatgcgatcttctggattatgaaagaccctacaattccaccggttgttaaactgaaaggagcttcccttgcttccgttatgggtgccacactggcaacaaaacgttcttctgcagagagacttgcgcctggcgttgacccgaacaaactggttgttgttccttatgccaacccattcagaacatatcctctggctaatgactatgagaagttcaagaaactggttgaagagaagcatgttgactgctacatcgttaataccggcgatttcatgggcaagaaagtccagaaagaagatactctgggtatcctcgaagctatcgttgagaaacgtgctgatttccatcagtggggtccgttctccgatatcgagatcatggattgggaaggttttgtgcctgatatgcaggacaagaactacacagatcagctcaaagcccgcatgaacgaccgtgtcgacgagatcaaagctttcgccacagaaaaagagggctatgacaagcttcctgatgatgcactggctgctatccagaaggttgttgacgaactgaaataa

SEQ ID NO: 2826 - DNA, 4365 bp, Coprococcus catus
atgcgagactatttgaaagaaaaaaactttatccgttttcctggcggcgaatgttatgaaattttgggcatgatcggcgaaggtggtttcggattaatttattctgcaggaaaagttgtcaggcagggtgaaaattatgtgaaggagaacagcctgcgctttgccctaaaagaatgttatcccatatccagacagtttaattttttgagaatgcagtcgggggaaattgtgccggagaatgaatcggaggctgctgccaattatctgcgctgtgtggcatccatgcagctgaatgaaggacagatgacatcggaaatttatgattcagaggccattcgattgataccgattcagcgaattgccagcagcgtggaaatttcctttgacaaaggacagcattttcattatgtgaataatgcctttacagtgatggcttccatggaaaataaaggagaatccattgcttcctggtatcaaaagaacggcagatatacgatggagatgatttttagagtcattcaggaaacgttatttgctgtgagagaagtgcatctggctggctatctgcatttggatctgcaggagggcaatatttttgtgaccggacagccgacggatgaaagtctgacctgttttctgctggatttcggctcagccagaaagagactggcagatggactgtgtgcccctgtgggtgatcagccgattttctcatcagagggctatcgggcaccggagattgtaggaatcatgacaggtgaaacaccggatttcagattgggaccggaagcggatttgtacagcataggctatctgcttttatatctgctggcaggacggcgttattcgacacgcatgctggaggatgtgcgaaagtcttatgatgggcattatcttaccagaaaaaatattcaggatatgaagtgcccgccccatgcggaagaaatcatacagcatattctggaaaaggcactggaaacagatccgaagaagcgttatcatacggccgaggaaatgttaaaggatgtatctgccgcgttgaatgtacttcggccttatcattcccagattgccggaatgaaatacgatgcttatattttgtaccggtcggataatattttacataagcatgtggccgttactttgcagaaattgttggagcattttcggacgccggggctgaagcggattcagcgggtttttcttgatgaaacggaattgtctgcggattatcaggcagacaaacaggtgatggatgccctgaaagccagccgatatctgattattatcggtcaggattcgtcaggtgatgatatctggcagtcaaaagaagtgaaattttttctgaaaacccataaaccttcagaggtactcacaattttggctgtacaaaatccgaaacagtcggaaatctcggagtcatcaaaagcggcagaagcatcaaatgtgtctggaacatcagaagtggcaggaatagcagcggtatcggagtatgcagttgttaaagtgggcggcagggatcgtaattttccgttggcagcggatatccggggcgcttctgagaaagaaattctgaagaagctgaagaaggatggctttttgagaattgcagcaccgattctttcagtgccttatgacggacttgtgcagcgttaccgaaaatataaactcagaaagagaatcacaacggcggcggtatgcctgtcagcggtagctgttttcacagtttatgcgctttatcagtcttatcagattgcattgcaggagaccattgcaagaaggaataaagcacaaaatctgtgtgtgcaggctatggatcagtatgacagaggagataaagaggccgccattgattctgcactgcagatgaatgccgaggcaggggatacagaaaattatgtgatacctgaacaactatacacattgaatacggcactggatagctttgagtccggatatcgcatgcattactcgccacttcagaaggtaagcggggatttttcacaggtggctttttcaaagaacggcggcgaatacagttatgccattaatcaggagggagagttggaagtcttttctgcaaaggaagagaagatgatatggacgttggatacagcggctattcagccttttgtggatgaaacgatagaaactgaggatggtattcaatttgttgaggcattagatacacatcgtgccattgtgtttattggaaaagacagtgttgtgaaggatgtgcatgcctatgcccttgtcattgatgcagacagcagaagtattatctcaggttttccgttggaagaacccattatcagctaccgaacagcggctgtctcctgcaatgagcgctatttggtttatgaagcttcaaagcttaaactctatgtgtacgatattgaaaaagggtctcaggttgaatgcattttggcagaaacaagtaataaagagtatcagtttacagatgtgtcgatttgtgaagacggaagtaaaattgcaattggaacggaaaaaagacttattgtatatgatatagagagtaagcagctgcaaacaattgccaatgttccgattggcaaagtggtatggacggataacagccatgtggcgtgcatgtcttatcagatccaacaggaatattttgcatccagtgacccatggagccgtgaaaaacgacagtatgcgatagaagtttatgatatcacaaatcagggaaacgcagagactgagaatgagaaaacgacggcagatgcagttatgacagacttggcttttgatacggataccatgggcctgaaggtgattcatagaaatgtgacggatgaaaacggaaatacagaaacaaggacagcacttcttggttggatgcgaagcaatctttattttatcgatgcagagacaggaaaggcagaagatgtccttgcttttcagtcggatattgtatcgattcagagcaggacagattccgaagattctattttcgttgctttatatgatggcaaagtgatgcaggtgacaatcggtgaaacaatcggaaaacgaaaagcctatgaagtagacaatgaattggatggcttttcctatacatcagataagaagttgatgatgtatacagaagaaggaattgttctttgcggtttatcaaaagacggggagatggtacagcattcgttttcaagtgattcttcagatgacaggtttgtggacgccactggcagtatggaagaaatgcggctgtcatcaggagaggcctatcgattgatgtggctgaatgataccagtagggaagaaggtacgatcgtcaggcatgcggttgaagtgtacccgcttcattcagatgaattactgctgcattatgaatgtgaggatggcaataccattaagatggtaaaactcacagaaaatgataccggaacatttctgtgtgtgctggagctagcaaatgaccgaaatgatgaaacaacaggaaaaatcaaggtgttatccctggataaggaaagcgaacagttctcctatgctctggatggacaggaggggctggatgcctcaggatggttatggatgacggacataatgcctgtgcaggatctatgtcatgccatgactttgaatcgtgacggtcagctttattgggtagattttgaaaaaggaaccgtggaaccgttatcatttgatgagaatgaatgtgagaaaatcctaagtatgtccatgagtccggatggcaggaagatattattgctgggtgtgaagaaagattatctgcaattattgagttatgatgtgcaaaatcagcagatagatgctgatacaacctggcagtctgagccaacatcaaatccggagaatgcatttttagcggaaatcagtgatggatcacaggtggctgtttatgatggcaatgcggagtgttatcttattgaaacagcgcatttgaaacagaaacaagttgttgacattgaaaatgccaagaatctgcagctcagtttttttgaaaatgatcagttcctgttaggggcagattcagagtgcatctggctgtatgatttggataagcatcaggttgtttcgagttatgcagtcagcatgagaaatcatgccatgcagttaacagctgatatctccggcagttatttcacattgaaggaaatatgggttacagagaacattcgacaggatgaggggatgagcaaacagaattgtcatatttatttcgtggatgaaagccatcagatttatccttatgcagatgtggcctttggctatcggctgccggatgaagagatggtttaccagtttaacagtgacggttatgcggaacatccgctgtatacatttgcagatttatataaaaaagctcagaaagagtaa

SEQ ID NO: 2827 - DNA, 2223 bp, Coprococcus catus
atggaaagcatacagggacttgtggagcatattgtctatcacaatgacaccaatggatatacagttttttccctgatgtgccagggggaagagattgtctgtgtgggaaatatcacttcgctggatgaaggagaatatctcaaggcagagggtgaatatacggaacatcaggtatatggaagacagttcaaggtgacttccatgagtgtggaagtgccggaggatgaatattccattgaaagatatctcggttccggggccatcaggggtgtgggaccgtcactggcagcccgcattgtcaagaaattcaaaaaggattctttcaggatcattgaagaagaaccggagcggttggctgagatcaagggcatcagtgaacgcaaagccagggagatctatcagcagtttcatgagaagcaggatatgcgtcaggccatgatgtttctggcgaaatacgggattacaacaaccttatccctgagaatttacaaacagtacggcgaggagatgtaccggatcattcaggagaatccgtaccggctggccgatgatatgaacggcatcggttttaaattggcggatgagatcgccaaaaaggccgggattggttcccattcagattttcgaatccgcagcggcattatctatatgctgcagcagggaactctttccgggcatatttacataccggcggcattgctggtggagaagacggcccagatgctgggggtggaagaagaagctgtggatcatctgcttcagagcctgcagatggaccgcaagattgttgtgaagaaaatagacgatgtgtcggtggtgtatggagcctcactttaccgtttggagctggagaccgcgggacttctgaagaatcttggtgtcgattacagcgtggatgagaaggaagtaggaaaggttctggaccgtattgagaaaagggaaggcattgatctggatgaccaccagcgtgaagcagtgtattctgctgcaggcaatggggtgcttgtcatcaccggcggtcccggtaccggtaaaaccacaacgatcaatgccattatcaaatacctggaatatgaagggttggagatgcgtctggcggcgccgacgggaagagcggccaaacgtatgtcagaagccacaggacgggaggctcagaccattcaccggatgctggaattatcaggcggaccggatgacgaccgcctgcgaacacagtttgagcgcaatcaggacaatcccctggaaacggatgtggtcattattgatgagatgtctatggtggatatctatctgatgaatgcccttttgaaggccatagccgtgggcacaaggctgatccttgtaggggatgtgaaccagctgccgagtgtcggaccgggcaatgtgctgaaggatatcattgattctgaatgttttcaggtggtacgtctgacgaagattttcagacaggcactggaaagcgatatcatcaagaatgcccatctgatcaatgagggacggcaaattgaacttggcaacaaaagccaggactttttctgcctgaaacgatatgatgtccagcagattctgggggtcatggtgcttctgatcagagacaagcttccgaagtttgtcaatgcaaggccttacgatatccaggtgctgacgccgatgcgcaaaggagaactgggggtagagcggctgaataccgtactgcagcactatctgaacccgccgtccccggacaagaaagagcgcgaatttcatcagggtgttatccgtgaaggggacaaggtcatgcagatcaggaataattatcagatcgaatgggaagtgttgggacattataatctgcctttggacaagggcgtgggcgtttttaacggcgatatgggcgttgtccgggagatcaatcattttgcggaacagctggtggtagaatttgatgaaggacgcagggtgacctatggttttgcacagcttgacgaactggaactggcttatgccattacaatccacaaatctcagggcagtgagtatccggctgtcattatgccgctgctgtccggcccgcgcatgctgtttaacagaaatattctttatacagcagtgacccgtgccaagcagtgtgtggccattgtgggggatgagcataccgtccgtcatatgatcgagaatgaaaaacaacaaaagagatatacgtctttgaatctgcgtctcagagaaatgaatacactttcatag

SEQ ID NO: 2828 - DNA, 2340 bp, Coprococcus catus
atgagtgatattaactgcagaatgccggcagtggcattgagaggacttgtatgtctgccggatatgatcctgcattttgatgtaagccgcaagaagtctattgctgcattggaagcagccatggtcaaagaccagatggtttttcttgtggcacagaaagatccggatgaggaagatccgaaacaggaagacctttatacggcaggtgctatggcgaaggtgaaacagatcgtcaagatgcctgagaatatggtccgtgttgtggcagagggcaaattcagggcagaactggacgagatgatttcggtgtctccctatttgctgacggatgtcattattcatgacagagaagaaaaggtggagaatgagagcgaggcagaggctatgcgccgtgtccttgaggaaatcgttcagaaatttatcgatgccggtgccaagtttggtccggagatcacaagacagatggaacaggcagaggatattgttaaactgacgaatcagctctgtgccaacatgccgatgcgttggcaggatagacagacattggcagagaagatggattttcgtgagcggtatgaagaattatgccgtatcatggagaaggaatacgatgttcttctgatcaaccaggatattcagaacaaggtcaagagccgtcttgagaagaatcagcgggattatgtgctgcgtgagcagatgaagctgatccgtgaagaactgggcgatgacatgcagtctgaaatcgatgagtatgagaagaaactggaagaactgaaggcaccggatgttgtaaaagagaagcttgagaaggaaatttcacgctttaaggcatccgcaggcaattcagcggagacaggtgttctcagaacctatattgatacattgtttgaaatgccatggagcaagacaagccgtgataacaagaatattgacaaagcagcgaagattttgcgagaggatcattatggactggaaaaggtcaaagagagaattctcgaattcctttccgtcagattactgacgaaaaagggagacagcccgatcctttgtctggtgggcccgccgggaacaggtaagacatccattgcacgttctattgcgagagctttgaacaagaaatatgtccgcatcagtcttggcggtgttcatgatgaagcagagatccgaggacaccgaagaacctatatcggtgccatgccgggacgtattgcgtccggactttctcatgctggtgtaaaaaatccagtcatgcttttggatgagattgacaaagtcagcacagactataaaggggatacattttccgcactgctggaagtgttggattctgagcagaacagcaagttcagagacaattatctggaacttccactggatctttctgatgtgctgtttatcgcaacagccaatagtttgtccaccattccgcgtccgctgttagaccgtatggagatcatcgagatcaatacgtatacacagaatgagaagcttcatattgccaaagagcacctgatcgagaagcagatgaaagccaacggcatcaaggcgaaacagctgacgatcagcgataaggccattgaagatatcattctctactatacccgtgagtccggcgtccgtggtctggaacgctgtctgggcgatatctgccgaaagacagcacgcatgatcctgcaggacggcaagaagaatgtcaaagtgacagagaagaacttggaacatttccttggcacgaagaaatatgattatgagatggccaatgcgaagaatgagattggcatcgtccgggggctggcatggaccagtgtaggcggtgataccctttctatcgaggtcaatgtaatgccgggcaaaggcaagtttgaactgaccggacatctgggggatgtcatgaaggaatcggccatggcagccatcagctatattcgttctgtcagcgaccagttcaatattgacagggaattttttgagaaaaatgacattcatatccacattcctgaaggggctgttccaaaggatggtccttcagcaggcgtgaccatggcaacagcgatgctttctgccattacaggtactccggttcgtgcagatgtggcaatgacaggtgagattaccttgagaggccgtgtgcttccaatcggcggtcttcgtgagaagtccattgcggctaaggtggcaggtattcacacagtgatcgtaccggagaaaaaccgcagagatatcagagaactggacaaagagatcacgaaagatatgaagtttgtttatgcatccacaatggcagatattcttccggtggcgctggagagtatgccgaaggcacaggcagcaaacagttaa

SEQ ID NO: 2829 - DNA, 2565 bp, Coprococcus catus
atgagaaatgcatttaggatttttcgccgagatttgaagcggattttgcgcaacccggcagcattactggtcatcataggtgtgtcgatcattccgtcgctctatgcatggttcaatattgttgcaaacattgatccttatgccaacacctctggtattaaggtagctgttgccaataatgatcaggaggcgtcgagcaatggcctttcgatcaatgcgggtgacgagatcattacgaatctgaaggaaaatgatcagctgggatggacctttgtgtcggaagatgaagccgttgaaggcgtcagatccggcaagtattatgcagcgattgttattccggacaatttcagtgaatcattgttaagtgtcctttcaggcaagcttaatacaccggaactggaatactatatcaatgagaaagccaatgccattgcaccgaagatcacgagtacgggtgcaagtacgatccagtctcagatcaacagtacattctcatcggttgcagcagagtctgtgtcggatgttgttaaaaattctgtgacagatgtagcagatgctgtaggcaatgtgaatacggacatcaatgagatgctgaagaaggcagatgccaatattcaggcgtacgaagatttgttggacaagtttaacaacagttctgattctaccaaggatctgatttcagatgcccagaaggcagcaggttcactggatgacgcagcggcctcaggcgcatctgctctggatgacgcggatacgatcattcagaatacgagaacagcagccggagatttttccgccatcctgtcctggtcactttccaatggagagctacttttgaaccaggcacatagttctgcttcagaggggctgacagagttggaagccaaggcaggcaagattaatacgacggttggcgatgcactggattcagccaattctgttgtatcattaaatggtgagatcctggacaatatgcaggatcttgtgaatcatgtggctgatgaagtggatggacagattgccaatgatatcattgacagactgaacagcaatattgccagtcttcaggagcagaacaacaagaatcagaaactgatcgacagtctgactgtaggcaataacagcatttcggatgcaatctccacaacatccgcaacacgtgaacagctgtcaggaattgcttctgacagtatcggcaatatccatgcttttaggatttccatggctcagaatgtcattcctgaactggacaaaacactggatacattctcaagtctgacgggtgagttgtccggtctgctcaatggcgtaccgacagcttccgagcagttccagtcggtttttgatcagctggatacaagtcttgcggatatcagggacgctttaagcggtacaacctctgcactgacaagtgtcagcggcaagctgaatgacattcagagtgatatgaatgcgcttgtaagttccgatacatataacaaactgctcaaactggaagacattgatgctgaccagatttctgagtttatggcatcaccggttgaactggatacagagacttattttgcagtgaagaattacggttcttccatgatcccattctattccaacctggcaatctgggtgggcggtattgttctgatcgcgatcattaagatggaagtagacagagacaaatctatgaaaaactatacggcatcagagatgtatatgggcagatggctgctgtatgtcgtgatcggtgtcattcagggctttattgtgtgcctgggtgatacgctgcttccgggggcgcaggtcgtgcatccggcaaggatggttattctcggtatgattctttcttttgtctatgttaatattatttatgcattgtctatttcattcaagcatatcggcaaggccttgtgcgttatcctggttattcttcagattccgggatcatcaggtacctacccgattgaaatgacaccggcattcttccagaacctgcacccgttcctgccgtttgcgtatggcgtcggtgctatgagagaatgtgtagcaggtgtatatggacatgtctatgagaaagatatactgattctgttgttatgctatgtgccgatttcactgctgatcggacttggcctcagaccggccctggtaggtctgaaccgtctgtttgacagaaagctttcagagacagagtttatgatctgtgaagaaccggatgaaacactcagccgtcatgaacagctgagaatgattttgaaggcatctctgtctgttgacaatctgagagaagagacagctgcaaaggcacaggcctttgaaggcaattataagaagatggtgcgtttcggattcttggcgatcatcattattccgctgattttccttgttctgatgttcagtctggaatcaaagatcgtattccttgtcctgtggatcctttcgatcattattatcgctgtatggctgatcgttgttgaatttattcacaataatctgcaagaacagcagaagattgcaggtatgtcctttgatgaaatgcttgagaaattccgtggaaaggagaaggaataa

SEQ ID NO: 2830 - DNA, 2142 bp, Coprococcus catus
atgttgatgattatgttgatgtgtatcccattatcaggaactgtcactgcgaatgcagccagttctgattatcggtcctgggcacagtgggattcggaatggggaagcattcatttaggcaagagccagtataccatgaagtcatcaggatgtctggttacagctattgcaatgttgatttgtcatacaggcagtgcagatgcatcctcctttaatccgggaacattggttacctacttgaataacaacggcggttttacatcagatggttctttgtattggggcaaggtatgcggcgcagcagacaactttacgctgtataacagccgagtgagcctggcgaatatgacaaaggcacagaagatcgccaagatggcggagtatgtcaataacggctacggtgttattgtttctgtcagaaacggcggacactgggtagctgttgacagaattgaaggcagcacagtctatatgctggatccgggtgaccgtaatacagatctttttgcaacatacagtgaatccggtgtggatcgtctggctatctataaaggcaagaatgcaggcggtacagtttcaggggatccgggcaatacagacaatacaacgacgcctgacaaagtgatcggaacaggcactgtgaattgttccagcttatatgtccgaagcggagctggcacgaataacagcattattacagccatcagcaagaataccagtgtagatatccttggcgaagctaatgacagcaagggaaggaaatggtatcaagtgaaggtaggcggcagaacaggttatgtctgtgccgattacattacagtcaaaaattccggttctaataacaataataataatacagaaactgcatcaggcagcggcgttgtgaactgttcagcactgaatgttcgaagcagcgcgggtacaggaagcagtgtggtgacaaccatatccagaaaccaggcggttacaattaccggaacagctaaagacagcagcggcagtaagtggtatgcggtgtcattcacgaagagcggtaagagctataagggttatgtttttgcacagtatattacattaaagagtgataacagcagcaatggcaataataacaataatagtaattctgataacagcacaccggcagcatctattccggcagttgttaactgcggtgcattgaatatgcgttcaggtgccggcacgaattattcagtcgtgacaacactgacaaagaatacagcagtaacgattaccggagaagcaaaggacagcagcggtacattgtggtataagattactgcaggcagtaagactggctatgtgcattcttcttatctgacgaagaagaacgcaggtggcaacagcagcaataacaacaactcagatacttcgacagatgtatccggacagacaatgaaggttgcgtatgatgtggtcaatgttcgaagtggagccggtacatctaagggcgttgtgacggttgtctaccagaatgagaaggtaactgtcgtaggtcaggataaggatagcagcggcaatatctggtataagattaagacagcatccggcaagaccggttatatccgctctgaccttctaaaggctgacagctcaaacagcagcgatacaaagagtgacagcaataattcaaattcaggaacagaatcagatctgaatggacagaagatgcaggtaaaatatgacggtgtcaatatgcgaagcggagccggtacatccaagggtgttattgaagtcatttatcttgaggatacattgacggttgtaggtcaggataaggacagtagcggaaatatctggtataaggtcaaggcaaagtctggaaataccggttatatccgttctgatatgctgaagcagtcctcctcatcaggcagcacagcatcatccgatcagacatcggacagtacaccgacaagcggtcgtgttgttgatggatggctgaatgttcgaagcggagccggtacatccaacaaagtactggttgttatttccgaagggaccaaagtgacgatcagtgaatctgttaaggacggcagcggaagtctctggtatcatattacagtgaactatggcggtgtgaattatgacggctatgtttcatctcagtatatcagcaagtaa

SEQ ID NO: 2831 - DNA, 1977 bp, Coprococcus catus
atggaacagatggacgatttacagaagcgttatctgaaacttttatctgagaagtatccgaccattgcgtcggcatcaacggagattatcaacctgtctgccattatgaacctgccgaaaggaacggagcatgctctcagtgatattcatggagaagccgatcagtttttccatgtgctgaagaatggttcaggggcagtcagagccaagatcgatgaagaattcggcaacagcatcagtatgaaggacaagaagcagcttgcaacattgatctattacccggagaagaagctggagcttatagagaaggaagaggacgatattgaggatttttacagaatgacctttcatcgcctgatccgcgtctgcaagcgttcacagtctaagtatacacggtcaaaagtcagaaaggcactgccgaaagacttcgcctatatcatagaagaacttctttacgagagagaagatatcctgaataaagaggcatactacaatgagatcatcaatacgatcatccgcattaatcgtgctaaggaattcattgtggctatgtgcaatctgatccagcgtcttgttgtggatcatctgcatatcgtgggggatgtttttgacagaggtccgggagcagctgccatcatggacagactgatgtcctaccattctgtggatattcaatggggcaaccatgatgtgctctggatgggtgcagccagcggacatccggcctgcatcgccaatgttatccgtatcagtgcccgttacggcaatctgaatacattggaagatgattacggtatcaatctgatgccgctggcgaattttgccaatacggtttatggagatgattcttgttcactgtttgcaattaagcatgtggagagggaggattacagcatcagtcaggtggaagaagaagtggaagttaagatgcataaggccattgcaatcatccagttcaaactggaagggcagctgatgatgcgccgaccggaattccatatggcggacagacttttactggacaagattaactatgaaaagggcagtataaccatagacggcaaggaatatgatctgcttgatcataacttcccgaccattgatccgaaggatccgtatgcgctttcaccggaagaagaagatattatgaaccgtcttgtgactgcctttaaggggtgtgagaagcttcagaagcatatccagttcttcttcaagcagggcagcctttatctttgctacaatgacaatctgtattatcatggctgtgttccgttcaatgaagacggcacattcagagatgtaacattgaagggcaggaagtattccggtaaagctttatatgatttccttgagagctgtgcaagaaagggctattatatgagcagtgatccggaagagaggctgtacggtcaggatattatgtggttcatctggtccaatgaggattcacctgtttttggcaaggagaaaatggccacatttgagcgatattttatcaatgaaccatcattgaaggaagaacgtaaggattattattataaactgatcgagagagaagatatctgtgatatgattctcagggaattcggtatggatccgaagcggtgtcatattgtcaatggtcatatgccggtgaagttcaagaagggggaaagcccgatcaagggcaacggcaagctgctgatcattgacggaggattttcaaaggcttatcagaagacaacgggtattgcaggctatacgctgatctacaattcctacggacttcgacttgttacccatgaaccatttgaaagtcttgaaaaggcgattatcgaagagaccgatatccattccaatattacagttgttcagctggtcaatgaacgccggctggttgcagataccgatgtcggcaagcagatccgcaaagacatcgttgatctggaacagctgctggatgcttaccgaagaggccttctcagagaaaaacgctga

SEQ ID NO: 2832 - DNA, 1968 bp, Coprococcus catus
atggtgaatcatagatataagagagctgtgttaggtattaccacagctcttgttgtttctgcatgtacagtgccggcgatggcagcaccgattacgatcaatacagatcagagtatatctgttgttagcaccgacagtacctatgtaggaggtctggatctggaagcaaggatcattacaactgttgagcaggatcaacgttctccgtatgcgaagaagggcatcgctgttgctgatgattatctgaagatccatacagaaccgaatggcgatgcagaagttgtgggtaagctttattccggctcgggctgtgagattgaggaagtcaaagacggatgggcacatattacatccggtgattgtgatggctatgtggaagcaaagtatttgctcacaggtacagatgcggaagcctatgcagaagaacacaaagtttctgagctggttgcaaagtcacagagtgagcagatgtatatgtacgaagaaccttcagctgatgccaagattgtgacaactgttttgtgggatcaggagctgacagtgctcggagcatcagacgatggccagtgggtacaggttaaggttggtgataacacaggttacattccggcagattcagttgttctggatgtgaaatacgaagaggctgtttctgttgatgaagagcagacgaagaaggaatctgagacggcagagacagaagcagagacaaaggctgctgaaactgaagcgtccgaaactgaagctgaaactgagaaagagacagaagcagagacaaaggctgctgaaactgaaacagcagaaacaaaagccgcagagacagagaaaactcagcaggataaagaatccgctgcttcttatacagatgtgaatgaaacggtatgggcaacgtattccgtatctatccgttcagcagcatcgacagatgcagataaactggatgtactggtaggaagctacagtattacacgtacaggtgttggcgacaacggctggagcaaggtggattacaatggtcagacaggctacatcaagagcgaatatctgacaacaacgaaaccggctgcagcatcagacagtacacagcagacaactgagaaaaagcaggaaacgaaagaaactgtttatgcaacagcaggtgtgaatatccgtgccaaggcatcagcagatgcggatgttatcggtacactgatcgcaggctacagcattacacgtacatcagacagcaatggctggagtaaggtggattacaatggtcagacaggttacattaagagcgattatctgacaacaacaaagcctcaggtaactgagagcaatcagacatcttcttcatccaatacttcctcttctaagagtgatattgaagaagtgaaagaaaccgtttatgcaacagcaggtgtgaatatccgtgccaaagcatcagcagatgcggataagatcggtacacttgcagcaggcggcagcattacacgaacaggcaagacaagcagcggctggagccgtgttgattataacggtcagacaggttacatcaagagtgattatctgacgacgaccaagccaactgtaacaagcaatacaactgcttcatctacttcatccagctcttcactgggccagcagattgcagacttcgctgtacagtatgtcggttatccatatgtctatggcggcaacagcctgacaaatggtgttgactgttcaggatttacacagcaggtttacctgcatttcggttattccattccgagacgtgcaagtattcaggcaactgttggcacatctgtagccatcagtgatcttcagcctggtgaccttgtattctatggtgacagcgaaggcgtcggccatgttgttatttatatcggtaatggcaaggttgttcatgcaagtacaccatcaaagggaattatcatttccgatctgtactacagaacaccaatgtgtgcaaaacgtattatctaa

SEQ ID NO: 2833 - DNA, 1686 bp, Coprococcus catus
atgaagaatcaaattgtcaatttactgtctcagaacatcgaagttctgaccagcgaagaaatctcacagcttattgaaattccaccaaaaccggaaatgggtgattttgcatttccatgtttccgtcttgccaaatcctatcacaaggcgcctcctatgatcgcacaggacctgaaagagtccattggtgatcaggcatttttaagtgaaatcaaggttataggcggttacctcaacttttatgtcgataaagcacagtatgcacagcagattatcgataagtataacaacgcaactgattatggctgttctgatcagggtaaggacaagacaatctgtatcgactactcttcacctaacgttgctaagaatttccacgttggccatctgagaacaaccatcatcggtaattctctgtataagattttctccaagctcggttataaagtcgttcgtatcaatcatctcggcgactggggcactcagttcggcaaattaattgttgcctacaagaaatggggcagtcgtgaagccgttgaagaaaaaggtattgaagaattaatggatatctatgtcaaattccacgaagaggctgaaaaggatgattcactgaatgatgaagcacgtgcctggtttctgaagatggaacagggtaacgaagaagcccttgagatctggcagtggttccgtgatatcagcttaaaggaatttatgcgtgtttacaacattttaggtatggaatttgattcctttgccggtgaaagtttttatcgcgacaagacagccgatgttatcaagcgcctaacagatgatggcttattaaaggaaagccagggtgctatgattgttcctctggacgaatatgatatgccgccttgtattgttgccaagaaagacggaagttccatctacgcgacacgagatcttgctgctattctttatcgtaaggcaacttacaactttgaccgatgtctctatgtcacaggtcttgaacagaaactgcattttgcacaggtattcaaggttattgaattaatgggcaatgattacgccaagaatcttgttcatattccttatggtctcgtaagccttaagagcggtaagatttcttcacgtaaaggcaatgttatttttgcagaagatctgcttcgtgaatcgattaataagacaacacgcattattgaagagaagaaccctgatattcctgataaggaagaagttgccaaacaggttggtatcggtgctattatcttcaatgatttatacaaccagcgaatcaaggatgtcatctttgactggaacaagctgctgaattttgatggtgagacaggtccttatgttcagtatacttatgcacgtgcttcaagtgtactgagaaagatcggcgaagtacctgatacaattgactatacattattaaccgacgaagcatctatcggtctcttaaaggaaattgaaagatatcctcaggtaatcaaagatgcagctgaacgttatgagccttcagttattgctcgatacagcattgatttagcccatgcatttaataaattctatcatgagtgtcagatcaacgttgaggacgagacaaccaaatatacaagaaccaatgttgtaaagattgcacgttacatcatcaaagacgctttatcattacttggtattcagtgtcctgaacaaatgtaa

SEQ ID NO: 2834 - DNA, 2628 bp, Coprococcus catus
atggattatagtaaacagaataatgaaaaaaagcgcaagaaaatccgttccaatgctgctaaatccaagaaaaagattactttcaatatattccgtttcacaatgcttgctattttgcttattgttattgtcggtatcgctgccgccatcggtggcttcaagggggtcatcgacagtgcacctgacattaccgccagcaatgtgatgccgagtaaactcaagtccgtcatgtattatcccgacggacaggaagcgattgaactggtaggcgcccaatccaatcgaacgatcgtgtcaattgatgatattcccaagtgcctttcaaacgcctttgtagccattgaggataaccgcttctatgaacataacggcattgacccgaagggtattgtccgtgctcttttcgttggtctttcccatggcggcaatttctcagaaggtgccagtaccatcacccagcagctgatcaagctcaccatattcaacggtggtgccgagacagatacgatacagcgattcaagcgtaagttccaggagtggtatctcgctctcaagcttgaaaaagagatgtccaaggacgagatcatggaagcttacctgaatactatcaacctcggccgcggtgcctatggtgtagaagcagctgcggaacgttattttaataagaagtgcagtgatctgacggtttctgaatcagcggttatcgcagcgatcgcccaatcaccttcctacaacaacccgattgattatccggatatcaacgcccagcgtcgcgacaagattctgaacaatatgctgacccttggtcttattacacagcagcagtatgatgaagccaaggctgatgatgtttattcacgtattaccgaagtcaacaagacaacgaagtccaaggatatcatctatacatggttcgaagatgctgccattgatcaggtattaaatgacctgcaggagaagcttggctatacttccgcagaagccaacaatgccctttacagcggcggtcttcagatttatctgacacaaagccgtcacattcaggatattgtcgacagctattataatgatgatgacaacttcccatccacagagtacagactccactgggctctgacttacaaagacaaggacggcgagaccgtcaacattgatgagaattctctgcagagctattatggcgctgatgactgtgatctgctttatgacaacgaagaccaggccaaacagtctatttcagaatttcttgaagccaagggcattactgatgacgatatcatcgcccagagctttgatatgactgtacaggtacagtcttcattcgttctgatggatcagtctaccggttatgtactggccttgagcggcggccgcggtgagaagaagacaagcagaagctttaaccgcgccacccagtccacacgacagcccggttctgttttcaagacgattgccgttttccttcctgctctggattcctgtgggctttcactggcatctaccaaggaagatgaaccttatacaactcctgacggctaccaaccgttcaacaccaatgccaactcctatcagggaacgacaaccatccgtgaagccattacttactccatgaacgttgttactaccaagtggctggttgaagatgtcacaccgaagcttggtattgaatatcttgagaatcttggcattacaaccatggacgaagaccgggatgcttacgcacctctgggtcttggcggtatctccaatggtgtaacgaaccttgaactgacaggtgcttatgcggccatcgccaacggcggtgtctatacagagcctatcctttacagcaagattctggacaaggacggcaatgtacttttggacaatgtacctgagaagcacacagccatgaaagattctactgcatggctcctgacaagtgccatggaagacgttgtatccaagggtacaggtacttccgcacagatttccaattacggtattgccgaagcaggcaagaccggtacaactgacgactacaaggatttatggttcgttggttatacaccttattacacagccggtatctggtttggttatgacgacagtacactgatgcgctaccgtctcggacgcaactacaacgcgcacaaggtactttggaagaatattatgaatgaagtccttgagggctatgaggacagagatttcgtgatgccgtctgacgttgagaagatccgcgtctgcagcagcacaggtttattggcatcttatggctgcaacgttattaccgagtattttgccaaagatactgcgccgacggaatactgttcgaagcatagctatcgttattacgagaatagttatgatgatgacagcagctcatcatcgtcctccggaagcaacagctcgaacacaacctccggggataattccggcaacgccaactccggtgctgacaattccggcggcaataattccggcggcgataattccggtggtggcaattccggcggtgataattccggcggtgataactccggcagtgataactccggcggtgataactccggcggcggcaactccggtagcgacaattccggtggcgacaattccggtggcgacaacactggcgccgagcaataa

SEQ ID NO: 2835 - DNA, 1824 bp, Coprococcus catus
atggctgaacagacaacacatactcttcctttgcgtgaggaagtccctgccaaggataaatggcacatagaagatattttttccaacgatgacgcatttacatctgcacttgaagcatgccgaacacatatcgacgcactggctgccttcaaagatcatcttggtgattcggctgaaacgctctgcacttatctgacgaaaaaggagaaagtactggtggaacttgacagtctctactgctatgcaggacaccgttccgatgaggacacatccaatccgcattatcaggaccttcgtggtcaggtcgattttacaggcaaccatttttatgagacaaccgctttcgaggatcctgaactgctttcccttccggaagattttataccagaagccttaaagaactactctgagctgatgccttttactcattatcttgaaaacacactgcgtatgaaatcccatacgctttcaaaagaggaagaggccctcatgtccctgactatggacctggacagcaccccgcagtccattttttatatgttcaacaatgcggatatccgatttgaaagtatcacagatcgtcagggcaatgaaatcggcatctcccacggacgtttcgttcctctccttgaaagttctgacagggatcttcgccgcaaagttttccagtcctactaccgttcctttgaccagtataaaaacaccgtggctgccatttttgctgccaatctgaaaaaagaactgttctatacaaaagccagacattatgcctcctccatggaagcacatctgtctcagaacaatattccgacagctgtttatgaccagctgatcgaagcggttcatgatgcccttcctgaaatgtaccgctatgtccgtcttcgccgcaaaatgcttggcgtagaggaactgcatatgtatgatgtctatacgcctcttgtatccggtgaacatgcatccattccttttgacgaagccatggagattgtcagccgcggactggcaccccttggtgaatcttacattcaactgctgaatgaaggcatgcacggcggctggattgaccgctatgagaacaaaggcaaacgcaccggtgcttattccggcggtgattatgcccaccatccttttgtcctgatgaattaccagggcacattggacaatgtctttacactggctcatgagatgggacattctcttcattcatggtatgccaatcacactcaccactatgtggatgccagctacagcatttttgtcgctgaaattgcctccacctgcaatgaagcactgctcatgcatgatctgcttgaaagatgcagtgatcctcacgaaaagctctggcttttgaatcattaccttgatatgttcaaaggtacgctgttccgccagaccatgtttgcggaatttgaaaaaattacccatgaaaagaccgcagcaggtgaaacattaaatgcccagtccctatgtcagatttatggagatctgaacaccctttatttcgggcctgatatggtaaacgatcccgagatttcactggaatgggccagaattcctcatttttatatgcctttctatgtctatcagtatgccactggtttttccgcagccattgccctcagtcaccgcattctgacagacggtgcaccagcagtcagagattatattgatttcttaaaagccggcggttccgactatccgatcaatgtcctgaaaaaagccggcgtagatatgaccaccaaagcacctgttgccagcgccctctctgttttctcatccgtgctggatgaaacagaggctgtcatcacatctctcggtctttaa

SEQ ID NO: 2836 - DNA, 1950 bp, Coprococcus catus
gtggaatataaatacgaagcatacgatgtggcggtcataggcgctggacatgcaggctgtgaagcggccctcgcctgtgcgcgtctcggacttaagacgattatttttacaattagtgttgaaagcattgcaatgatgccttgcaatccgaatattggcggcagctcaaagggacatcttgtcagggaaatcgatgcccttggcggtgagatgggaaagaatatagataagacattcattcagtcaaaaatgttaaatagttcaaagggacctgcggttcattctctccgtgcacaggctgataaagcggattacagccgaaaaatgcgccagacccttgagaatacagataatcttacaatcaaacaggctgagattgtggacattatcgtggaagaaggatgtatgacaggtgtgaagacgcatacaggcggaatttatccatgtaaagcggctgtgcttgccacaggtacttatttgaaggccagatgtttgtgcggtgaaacaattacttatacaggtccaaacggattaaaggcggctaatgatctgtctgaagctcttaagagagaggggattgagctggtacgttttaagaccggaactccggccagaatggacaagagaaccattgatttcagtaagatggcggagcagtttggggatgagacggttgtgccgttttcatttacaacggatccggcatcggtacagaaggagcaggtttcttgctggctgacttataccaatgaggaaacacatcagatcatcagaaacaatttggatcgttcaccgatttatgcgggtattattgagggaacagggccaagatattgtccgtctattgaggataaggttgtcaagtttgccgataaaaacagacatcaggtttttctggagcctgaggggctttatacaaatgaaatgtatgtgggaggtatgtccagttctcttccggaggatgttcagtatcagatgtatcatacggtgccgggacttgaacatgcgaagattgtccgtaatgcttatgcgatagaatatgattgtattccggctacgcagttgaaaccaacgttggaattcaagaaaatcagtggtctgttcagcggcggtcagtttaatggcagttcgggatacgaggaagcggcggcacagggattgatggccggtattaatgcggcgatgaaggtgcttggaagggatcaggtgatcctgaagcgttcggatgcttatattggtgttctgattgatgatctggttacgaaagaaacccatgaaccgtaccgaatgatgacatccagggcagaatacagactgcttctcagacaggataatgctgatcagagattaacagcaattggtcatgatatcggtttgattgatgatataagatatcaacacctgcttcagaaggaagtgttgatttatcgggagattgaacgtgtcagccatgtcaatatcggtgcgggtccgaagacacagaaattgttggaagcatgcggcagtacaccattgaaaacagctgctacattggctgagttgatccgcagacctgagctgaattataagatgttggcggatattgatgaggatagacctgaattgccggatgaggtgactgatcaggtagagatcagcattaaatatgatggctatataaaacgtcagttgagtcaggtagagaagtttaagaaacttgaaagtaagacacttccggaagatatctgttattcagatatccatggccttagaattgaggcacagcagaagctggataagattaaaccggtttcaattggccaggcgtcacgtatatccggtgttacacctgcagatatttctgttttgctgattcatttgtctcaggggggtcagaagcagcatatacaggacatgcacaacgatgaaaagccggaaaatgatacacatgaaaccgccaatagagaataa

SEQ ID NO: 2837 - DNA, 2331 bp, Coprococcus catus
atgatagagaagatacaaaaaagaaatggccagatggtggcgtttgattcagtgaagattctgaatgctatcagcagagccaatatggcagttgaagatgaggtgatggaaccggctgatctgtcttacctgacacagaaagtgtgcagtcagctgaacccggatgaagttgtcacagttgagcatgtacaggatgttgtggaggagacgttgatccgttttgattatgcgaagactgccaaggcatacattctctatcgtgctgagcacacgaagatccgtcagacggaatccgatctgatggatatttattccaagctgacctattccagtgccatggatgaagatatcaagcgagagaacgcaaatattgatggtgatacggccatgggtacaatgctgaaatacggttcagaaggtgcgaagtatttcgttgataattatgttttgccgaaggatatcgcagcagcccatatcaacggtgatatccatatccatgacaaggatttctatatgctgacagagacttgctgtcagattgacctgatcaagctgtttaagaatggcttttcaaccggccatgggcatctgagagagcctcaatccattatcagctatgcagcactggcatgtatcacgatccaggccaatcagaacgagatgcatggcggacagagcgttccgaactttgattatgcgatggcagacggcgtgaagaagacgtatgccaaggaatattatacatggctggcagccagcatgcggctggaggcaggtattgatgatggacaggcagctgctatcattgcccgtgcgaaatccgagattacagaggaactgcgcattgccaatatggatgcctacggcaaagctttgctggcactgaaacctgaggaaatttcagaggaagatttgaagaaggcacatgattttgctgttgctgaagcgttgaagacgacagagaagcaaacccatcaggcaatggaggccctgatccataatctgaatactatgaattcccgtgccggtgcccaggtgccgttcagctctgttaattacggcacagatacatccgaggaagccagaatggtgatcaggaatctgttgacagctacagaggatggccttggcggcggagagaccccaatcttcccggttcagatttttaaggttaaggaaggtgtgaatttcaatccgggtgatccgaactatgacctgttccagttggctttaaagacttctgcgcagcgtctgttcccaaacttcagttttattgatgcgccgtttaatcttcagtattatcgtccgggtgattataatactgaagttgcttacatgggttgccgtacaagggttatgggcaatgtctacgatccgaccaaggaagtaacctgcggcagaggcaatttaagcttcacatccattaacctgccacgtctgggtatcgaagcccatggcgacattgacaagtttttcaagtcattggatgatatgatagatcttgttatccgtcagctgatgcaccgtttcaagattcagtgctccaaggttgtcagaaactatccgttcctgatgggacagggtatctggattgattcagaacatctggatatggatgacagtgtagcagaggttctgaagcatggtacattgagcgtcggattcattggtctggcagagacattgaaggcactgacaggcaagcatcatggtgaatcagaagcatcccagaagctgggacttgagatcatcggtcatatgcgcaatcgtatggatgaagaatcccggaagacaggtctgaactttacattgctggcaacaccggcagaaggtttaagcggtcgttttgtccggattgatcagaagaagtacggcaagattccgggcgtaacagacagagagtactatactaactcattccatgtgcctgtttattatccgattaaggcttataagaaaattcagctggaggcaccttatcatgcactgaccaatgcgggacatatcagctatgtcgagttggacggtgacacatgtaagaacctgaaggcatttgaatctgtgatccgatacatgaaggagcagggcatcggttatggttccgtgaaccatccggtagaccgtgatccggtgtgtggatacacaggcgttatagatgatatctgtccgcgatgcggacgtaaagaaggagaaccggtcagcctggctttccttaaggaactcagaaagaaatatccgaatgtaccggtgtacacggatgaagaaattatggcaggaggaattgaacatgactggagaagaactcaggaatgcggatgcagcagcaaatag

SEQ ID NO: 2838 - DNA, 2034 bp, Coprococcus catus
atggataatcagaaaatgaacaacaatcgtccggatcaggatccggaaggcggcaataataagaaggatgacatgaacaagaagagtcttcttgtcatggttgttcttgcaattgcagtgatgattattgcccagatgctgtccggcaagattgcatccgcttcccagaaggaagtgacatatacagaatttatgcaggatgtcaaggatggaaaggtgacgaaggtggaactggattcggaccgcatttattatgaggtgaagaaccagaagaatgtcaagtattatacaggcaatgttcaggatgaacgtctctatgaggaactggacaatgcaggtgttacctattcacgtaaggtcattgatacgacaacgtatgtgatgagcagcattttgtcctttgtattgccgacggtactgatggttgcagtgatgatgatcttctaccgttttgcattcaaaggcggcggtggtgtgatgggcgtcggcaagagcaatgccaagctttatgtgcaggacaagacaggtgttacattccaggatgtggcaggtcaggaagaatccaaggaatctctgagagagattgtggattttcttcataatccggagaaatatacgaagatcggtgcgaagctgccaaagggcgcgctgcttgtgggacctccgggaacaggtaagacattgctggccaaagcggtggcaggcgaggccggtgtaccgtttttcagcttatcaggttcggattttgttgagatgtttgtcggtgtaggtgcttccagagtcagagatctgtttaagcaggcacagcagaatgcaccgtgtattattttcatcgatgagctggatgccatcggcaagagccgtgactccagattcggcggcaatgatgaacgtgagcagacattgaaccagttactggcagagatggatggttttgattcatccaagggaattatcattcttgcggcaacgaaccgcccggagatccttgataaggcacttctcagaccgggacgttttgaccgccgtattatcgtagagcgtccggatctcaaagggcgtattgatgttctgaaggtgcatgcgaagaatgtctgtatggatgaaaccgttgattttaaagagattgcattggcaacaagcggagccgttggctctgacctggccaatattatcaatgaagcagcgctgctggctgttcgtaatggacgtaatgcagtatctcagtcggatctttttgaatccgtggaagtggttattgccggcaaggccaagaaggaccgtgtactcagtgccgaagaacgcagaattgtttcttatcatgaagtcggacatgcactggtggctgcccttcagaagaacacagagccggtacagaaaatcacgatcatcccgcgtacaatgggtgcattgggatatgtgatgcaggtaccggaggaagaaaaatatctgatgtctgagaagcagattcgtgaggaactggtgacaatgctggcaggtcgtgcggcagagagcattgtatttgacagtgtgacaacaggtgcatccaatgatatcgagcaggcaacgaagctggcacgcgccatgatcacccagtatggtatgtccgagaaattcggcctgattggtctgacaactgttgaagatcagtatctgggaggacgtgcgacccttaactgcggcgaagccacagcagcggagatcgatcaggaagtcatgaagatcctgaaggatgcttatgaccaggcgctggcgcttctggctgacaacagagactgcctggacaagattgcagcgttcctgattgagcgtgagacaatcaccggcaaggaatttatgaagattttccgtgaagttaaaggcatcccggatccggaaaccgaacaggcagaagcaaatgtttcaaatccggcagagaatgattcgcaaccggatggacaggatgaaccggctttacttgaagcaaaaacagacaatggggcatcatcagaatccgacatcaacgtctccttagagacaaaagcagaagattaa

SEQ ID NO: 2839 - DNA, 2142 bp, Coprococcus catus
atggaaagacaaaggttaatggttggatacgatctgtgtgcggactattcacagatcagttattacaatacagaaaaagaagaaccggattcggtcaattttgatggacagaacgaaatcccgacagtgctgtgcaggctgttttccaatggtgaatggcttgccgggcagcaggccctaaaagcggcggaggcaggcaacggtgttttggtgcgcgattttattgtacgcattgctgatgatccaatggtggatgtggctggtgagcgtatggaaaaggccggactcataggcatatttttacagaaaacgctgaaggctcttgagactgtgtgtgagggtgcagaggtcggatttatcacgattaccatggaagacgtggatctggcagcagcggatgcgctgaagcgtgcagcggcttcaatgggaatcggcgcacagttgctggcgctggaaagccatcgattgagttatgaatattatgcattgtcccagcgacgggaattatggacccatgatgtgggcttgtttgaatatgatcgccgagggctgcggtatcatcatctgtctgtatcctggaagcaccatccgccggtggtaacagccgagacaacggtgctgaaccagtatctggatggtcatgaactggcagatccggtaccgcctgagatggacagacagtttcttgaagcgattaaggaagtatcagccagaagaatgatctcaacctattatctgatgggtgagggattctctggggcagaatccggcaagagctggatgaatctttcgctgaaacagttatgtgccatgaaaaggcatgtttttgcgggacagaatctctatgcccgaggtgcctgctatcacagttttgatcagggaagttttggaagaaaaccgggatttattgcagcgaatgccggtctgctgacgaaagatatctatctgcggtcggtacataagcatgcaccacagaagctgatactggcagcggctggggcaccctggtacagtgctgtttcaagaaaagcgatcattatagacggtcaggaacagttgataatcagaatgcgggatccgctgacgaattttgagcagacggcggtgatgacactggatgctttgccgcagcgtccgccgaagacaacgaagttattgatcgagacttcttttcgatcagagacagactgccatatccgtgtgacagatatgggatttggcgagatttttgcggcgacaggcaaagtgtgggagatgcattttgatataggggaggcttcggaggcatccgggcagtctgcgaaggaggctgtcattgaggcaaccattcctcaggaagtttttccgctggatatgaagatgtccggaactcgtattttctcgctggaggaattatgctggtatttgtcgaagaatgtttatataacgacctatgatcttttcgatgagaagatgtttttctggatggataagattacaggcagccattctctggcgctggcactatttaattacaaatccgccggcaaaccattaaaagagattgtacgtctgcttctgaatgcggttgattatctggataatggggaaattgcccggatctacaataagctcacggagatggagcatcagaatcctttagagcagatgcgccttgcggcggacaactataaccgatacggacattatatggctgctttgaagaattatcaccatgttgtctatcagatgacgcatgattatgacagtgagatgacaagacagttcaaggctgacacatggcacaatatgggcatggtttttctgcggcttcacaatatcaaatgtgcggcggaatgtatgaagcgggcctttgaactggtgaaaacccaggattttctggcaccgtatatgtatgtgctggagctgttgggagatcatgagaagattctgacgttgatccgtcaggaagatatcccgacggatatcagtgatgcgattctcaatcgctataaagaggccgagcatctgtgtgagcattcggaggagaaccggaagatacaggatggcctgacattgggaaatggtcagacaactgcaaaatattgggattttgtcagagattatctcgaccggcagaagaaaaactatgatttgacataa

SEQ ID NO: 2840 - DNA, 1740 bp, Coprococcus catus
atgttatcttatctcaagcgctataaagggcttgtttttttaaactttatttctgtttttgggtttgcattgacagaactgggtattccgacgattatctccagaatggttgacggcggtgtagccagtggggatcgggaatatctgctgaaaatgggtgggctgatcgctctgatttcggttgtgggcattctcggaacggttgtcctcggctattgcggtgccaggatttctacagcggtcacctgcgatatcagaaatgatctttttgaaaaggttcagagtttttctcatcgggaaatgaatcagctgggtgtctcttcactgatcacaaggacgagtaatgatgcacttcagattatgaattttatgaatatcattctgagaacggcaatgctgacaccggtcatgatcgcggtcagttttacgctgatcatcatgtcatcggtgaaattatcgctgatcattgcggcgacagtgccttttattattctgggtgtcatacttgttgctaaaatatccggtccggtcagtgaacgtcagcagacggcattagatggcctgaatcgtattttcagagagaatctgacaggaatccgggtgatccgttcttttaataatgatgcccgtgagacagaacgtttcggggaacagaatcaggcgtttacaaatcagtccaaaaagctgttcacattgatgagttctacggaaccgctgttttttcttctgatgaatattgcagcattggcgatttattttgttgccagtcagatgatcgatcagagtgcgctgcaggtggggcagctgatggcgtttatggaatacctgtttcatgccatgttctcagtgatgctgttctgccttgtgttcatgatgtatccccgtgcgaatatttcggccaaacgtatagaggcagtgatgaatatgacgccggatatcacagatgagactgtcagcacgcagcgtgtacatgacgatagagaacctataaaagaagttatatttgaacatgttgatttctgttatccggatggggaagaagcggttctgaaagatatttctttttctgccagggccggacagacaacggctattatcggaagtaccggttccggaaagagcacattgatccagctgatcccgagattttatgacgtgaccggcggacgtgttctggtcaatggcgtggatgtcagacagatcaacagtcataagctgcgtgaacatatcggatttgttgcacagaaggcgaatttgttcagtggcaccattgaggaaaatattcgtttcggttgctctgaagcaacggatgaggaaatacggcatgctgctgatattgcgcaggcagcggattttattatggataagccaaagggttttaaagaacggattgtagagggagcaggcaatttgtccggcggacagaagcagcgcctgtctattgcaagggcgctggtcagaaaaccggatatttatatttacgacgattcattttcagcactggatatgaaaacagatgctgtactgcgtcaggcattaaaaccggaagtgaagaatgcgattgttatcattgttgcccaacgtgtttcgacaattatggatgcggatcagatccttgttctggatgaggggcgtctggcagcatcgggccgccatgaggaattattaaaaacatgcccgctttactatgaaattgcagcatctcagctgagtgaggaggaactgcagaatgtctgttga

SEQ ID NO: 2841 - DNA, 2187 bp, Coprococcus catus
atgagaagaaggatgattgtgctgcttgtagttatgctggtatcaggcgctttgatgggaatgtcgggcacagatgatactggattgaagttatccgtgaaaaaggtgtcaaaggccgatgagggtcgtgagatttatacaggacaggagagcgtttcacttgttttggcatggaatgagcatgcagagggaactgcggcatcagatgtacaatggatcatgtgtcggggcagagatcatttaggctatcagaaagaagaaaagcgtcagacagaaggaagggggactatgacttatgtgcctgatttgtcagtttttgcagacggagaagtaactttttcattttgggcggtagatcaggccggcaatacgggagaagaagcgcagatcgtactgatgaaagacagcacatgtccggtgattaccgggcgattggatacgaaagggcggagagtgggagatttttattcggacagctgtcaggtatccatctttgtgcaggatgagaattttgatttttcatataggccgagtgtgcagacagagaatgaggatggctattcattttcggggtggcgcagaaatggtgacaaggcagagggtgtgatgacatttgatggggaaggaacttaccagctgacattttcatgcagagatctggcaggtaatgaagctgaaacactggttgtgccggaatttaccattgaccggacggcaccggaagtttctgtgaagttcaatgaatcagacagtcatcatgaaacttattacaatcaggtaagaaaggcattgatcacagtgaatgagcagtggtttcggccggaagatggtaggataacagttgtctccggcggcgaagaaaaaaatgtgacagagattgattgggtgaagacagatcaggggtatcagtcagaaatcctctttgaaagggatggcatgaatgctttaacgatagagtggtcagatcccgcgggcaatcaggcgaagcgttatcaatctggggcatttgtcctcgacaccgtgaagccggaattgtccattaagggtgtggaagcctattcatcgaataatggaaaagtggagccggtgatagatatttatgatgttaatcttgatgaaggggaggtgacagttgcattagatgaattaacaggcaagaaggtggagatgccggaggtggaaaggcaggaaacagatacgcatcatctgcagcttgcaatgggagatttcggtagtgggatggacggtatttacagattatctgttcatgcagccgatctggcaggaaatgatgatgaggcagagctgttttttacggttaatcgcaatggctcatattatgcctttgatcagaagacagaagcgatggtacaaaaggtttttatcagcagtccggagaaagtcgttatttatgagaacaatatggactggctgacggactcaagcgtgatcctcagctgtaatggcagtctgcgtgagctgaagccggagaaggactatacaattgaggcggttggcaatgaaacgtcaagaaagcaatatacttatacaattgatgagaaatgtttcagccgtgagggaacgtattcactttatttggattcgaaagacagagcaagtaattactcatcagcagaacagcaggcgcagaccatcggttttattgtcgatcgaacagcacctcgaatttcgataattaatctggaagagcagcagtattatcatggaacatctcataattttcaggtgacggttgatgataatacacagctttcctgtgtgaaatattatcttgacggcaggctggaagaacagttttcgaaagatgagattgaagaagcggagagactgcttgaattgcagacgggagcttcagatgagtatcagacgattcgcattgttgcagaagataaggcaggcaatactgcggattcaggggagtggcatgtgctggtgaatacatcggatcgaaccagaaaattcaagaagcatacagaacaatccaggacgcagtggcgtcagaattccgcagaaccggagaaacagcaggccaatgacaggcaggcggccggattgattgccggtattgcatgtgtgatacttgtcggaggatgtgtatggtatcgacatgaacagaaaaagaaagtcagtatcaggcgattgcccgatactgacgatagaaaataa

SEQ ID NO: 2842 - DNA, 1785 bp, Coprococcus catus
atgacaggaggggaaagaatgaaaaagcttgttgcagtgacaacaacgattttgattattctgattgctgtactgagtgtcttcatgatcaaggggcatgggtctgacagcagtacggcgaaatcgacactatcggatctgaaagagagtctgtctgataaagaagatacaaaggcagcggaggcatccaaagacagtgatgcggactgggtgtatgatggtgagctgcttcgcatgaataagcagatgaagaccattacatatgaaggaagagattttaaggtcaagtttaccaatccgttttatgaagaaggcagtgacagctacatcagtgtcattttttatgataaggcgcatggatatctgttgaagtctctgggagaaggcacggacagtgcattctatgaagcctataaaactgaagatggctgtgagacatggaataaatgtactgcggatgtatggtttgacttaaatggcagtaatcatttggagatgatcagtgagaatgagatcgtctatgtatgttcagtggtcaatgagaatctcggtaccaatgagacgaccatcagctacagtgcagacggcggtgattcatggcaggcatttaagagtaattccggcggtgacagtgaagcaatcaaggctatcattgacaagatgacactggagcagaaggtggcacagttatttgttgtttctccggagacactgaccggtgtggattctgtacagtatgcgggcgatatgacctatcaggctttacaggattatccggtgggcggtattgtgtttgcgaaggataatattgattcttcaagccagtttggtacgatgacagataatctgcagtcttacagtgaagagatatccggccttccgcttttcctggcagcagccgaagagggcggcagcgcatctgttctcggcaataatgacaatctggatgaatactacgagaacagctacagtgatgacgacagtgactattcgtcatcatcagcaaattcggtacatagcggtgcaccgtccatgtctgaaatcggacgcaaggatgacagtaccaatgcctatgaagcaggcaagtccatcggcagtctgatgtcagcatatggattgaatcttgatctggcaccggttgcggatgttttatccggcaacagtaccggcatcggcaatcgtacatttggcactgatgcccagacggtttccgatatggcactggaggttataagaggtatccaggaggaagatgtgaatgcggctatgaagtatttcccgggatacggtgcagcatcttcgaacatgtccggttttccggtgatcaacagttcactggatgagctgaagaagaaggaattcctgccgtacagcaatgccattgcacagggaatggattttgttatggtgggacatatttctgtgccgaatgtgacaggtgatgatacaccggcttcgttgtctgagaagatgatcagcgaggtccttcgtaaggatcttggatttaagggaattgttatgacagattatctgaacgacaagaccattgtgaagaactacggtgcagcggatgcagcggtgaaggctattcaggccggggctgatcttctgcttgaaccggatgatttggaagcagcctacgaaggcgtactcaaggcagttaagaaaggagatatcacagaggatcgcctggatgaatctatttaccgaattctcagagtgaagctttccatgcaggatgaatcctcagatacgacagagtcagagagcgtcagtgactattag

SEQ ID NO: 2843 - DNA, 2307 bp, Coprococcus catus
atgcagagaatatatttaaatgacaactggtattttgcaagaaattatacagaggatctgttgaacccggaggctgatctgtcagaacttcggaaggtgcggattccacacagtgtgtgtgaattgccttacagcaattttgatgaaatgtctgtgcagcagctttgcggatacagacgcagtctgatagtagaagatgcatggcgtggaggtcatttgatactgacctttgaaggggtagcccatgaagccgccgtctatgtgaatgggaagctggcggtgaaacattatggtggatatacagctttttcggtggatattgtaccgtttcttgtggatggacgtgaacaggtgattaccgtgcgcttagacagcagagaaaagctgaatcagcccccttttggatcggtgacagagtcactgacttacggtggcatatatcgggatgtttatctggatgtgaaggatgaatattatatagaagatatttatacagccaccccggatgtcagaaccgatgaaaagatattaaaggcacaaattaagctgaatgcgtatacggaaggattgagactggccgctcatctggatacctggacagagattcctttggagggtgaagatcttcagcattgggatttaaaaacagcggatgtgcatttcagaacgtcctgtctgacctatacagtgccggaagcgatgctatgggatgtggatatgccgattctctatgtactgacggtggaacttctgaaagatggacagtgtgtagacacaaagaaggtaagaatcggattccgggaagctgtttttgatggagagggattctggctgaatggacgtatcctgaaattatgcggttttagcagatatcagagctggccttatgtggggtatgctatgccgaaatcaccgcagcagctggatgcggatttgttgaaattcgagttgggagcgaatgcggtgcggacgatgcaggggccacagtcgcagtattttatggacaggtgcgatgagattggcctgcttgtcattccagaaattccgggctggcagtttatcggcgatacacggtggaagaaaattgctgtgagaaatgtccgtgaaatggtgatgcagtatcgcaatcatccatctgtgatcctgtgggatacgcgtatcagtgattctgatgatgaagatgcactttattataagacaagccgtttggccagagaactggatgtctatcggcagacaggcggtgagagagattttgcaggcagtcatttttatgaagatgtgtatttgtatgatgatatgagtgaggatgctgccagtgtttctatcagcagtgaaaatatcattcaggatttgtcgaaaacttgccttttatccgggcacaagtctctgaatgtgcagacaaaagtcggcacagaaataaatgatttgattggacagaccatgcggcaggcaagcgtgtggcgggctgtggagagcaatgacagttttgcaggcagtctggcgcctgttatggcagattatccggtcagccgcaagtacagcggcagtgacggcatttgcagcagagggcttatggatgcgtttagaaatccgaagatggcggctgcttttttcaagagtcagcgggaggacgaaccagtatgcgcagcagttttgccgatggatgaccggcttatggtcatgaccaatgcagaccatattttactttactgtgacgaaaagctgattggtgaattttatccggatgaaacggtattcagagatctggtacatccgccgatttttgttgaacatctgtctgaaattgttcgtacaggagaaaaaccaaaagaacagaaagaaacgtcaaatagagtctttttgaaaaaacaatccgagaaggatcaagagctgtttgttcaacagaaatccgagctggcattttccagaagatacgcggtgacatggcgcattgaggccatcaaagatgatacggttgttgccgggacaagtattacgccgacacctgaagtcagattgcagattacaacggatcgtcagcatatgatggaagaaagcagctacgatgcagcaactgtgcacattgaagctgtcggtgagagtggtcagcatctgtatggatatgagacgccgctggtactgaagacagaaggtgatattgaactgatcgggccgtcggtgattgttatgaaaaacggctttgcgggcacttatgtacgctcaatcggcaaagcaggaagtggacggctgatgattcaggatggacatggagaagcagttgtcgaattttctgtggaagtatag

SEQ ID NO: 2844 - DNA, 2634 bp, Coprococcus catus
atgagtaaagtgattttgatcgacgggcacagcattttgaacagagcctattatggcattccactgttgtcgaatgcagaagggctgcataccaatgcagtttacggctttttgaatattatgtttaagatacttgatgaagagaaagcagattatcttgcggttgctttcgatgttcatgcgccgacattccgccatgagatgtttgaggcttataaggggacaagaaagccgatgcctgaggaattgcgggagcaggttccggtgatcaaggaagttctgcatgctatgcagataccgacccttgaacacgccggttatgaggcggatgatattctcggtacacttgggaaagcttatgaggcggcgggatatgctgtgtccattatatccggtgacagggatctgcttcagctggcaacggacaagatcaagatccgcattccgaagacgaagatgtcaggtacagagatcgaagattattatgcagcagatgtctttgaaaaatatcaggtcacaccgacagaatttattgacatgaaagcactgatgggcgatacatcggataatattccgggtgttcccggcattggtgagaagacggcatcgaagatcatcagtacgtggcacagtattgaagaggctcatgcacatgcagcggaattgaaaccgaagaaggcttcagagaatttggtcacttactatgaacaggcgcagttcagcaaggttctggcaaccattaagacagattgtgtgctggatttcaaactggaagatgcagccatcgggcagatgatgaacgatgcatcctatgcccttttgaagcggttggaactgaagaatattctgaagcgttttgacagtgtggcagaaacaacggtgaattatcagacagtaaaggtgctggatgattttgcagcggctgtttcctggctggagggaattggtgagacagatcaactgggactgtattatttctcagaagatgattttgagggtctggctgcctgcaaagcagacaatgtgcctgtttatattccggcggaagggatgatgacagcagcagtccttcgtgagatggcggcagcggcggcgaagagagccggtgtttgctgcatgatcgatgtgaaaccgcagttgtactggttggagctttcggaagaggacggcatttttgatgcggccatcgcggcatatttgatcaatccgttaaaggacagctatacctatgacggtattgcacaggatttccttggcatgacagtgccttcaagagcggattggctgaagaagatgacgttgacagaagcatcggaaaaagaaaaagagagttttggacattatcttgcgtattcggcgatgatccctgtacaggcgtatagtactttaaagaagcggcttgaggagaccggcatggaccggctctttgatgagattgaaatgccgttggtatatgccttatatgatatggagaaggcaggtattgctgttgagaaggacgcccttgcagaatacggcagccgactgacaggcaggattgatgaactggagaagaatatttatgagcttgcgggagaatctttcaatatcaactcacctaagcagctgggcataattttatttgagaagttgggattgccttttgcgaagaagacgaagacgggttattctacgtctgccgatattcttgaaaagctgcgtacttatgatccaatcgtggggcagattcttgaataccgccagctgacgaaattgaaatccacttatgcagatgggctggccggttatatccggccggatgaccagagaatccacggcaagtttaatcagaccattacagcgacgggacgtatcagcagtacggaaccgaatcttcagaatattccggtgcgtatggagcttggaaggctgatccgcaaggtttttgtacctaaggaagactgtatctttgtcaatgcggattattcacagattgagctgcgtgtccttgcccatatggccggggatgaacatctgatccaggcctacaaagaggcccaggatatccatcggatgacggcttcccaggtgttccacacacctttcgatgaagtgacgccggctcagagaagcaatgccaaggcggttaatttcggtattgtgtacggcatcagttccttcggcctcagccaggatctgagtatcaccaagaaggaagcagagaattatatccagcagtatttccggacctatccgggcattaaggcgtttcttgaccgttctgtggaagatgcaaaggagaagggatacgccgtgacattattcggcagacgccgtccggttccggaactgctttcaagtaattttatgcagcggtcttttggtgagcgtattgccatgaattcaccgattcagggaacggcagcggatatcatcaagattgctatggtcagagtgaatagacgcttgaaacggcagcatatgaagtccaggctgatcctgcagatccatgatgaattgctgattgaggccgttttggatgaagtagatgcagtgaaggcgattttgaaggaagaaatggaacatgcagcgacattggcggtgccgttggagattgatatgcataccggtcataactggtatgagttaaaataa

SEQ ID NO: 2845 - DNA, 1731 bp, Coprococcus catus
atgaagagagtattgccgattataatcgttattttgctgattataggcgtaggaggcggagtagtctggagtattctggcaggccggtataagccgacagaagaggtgatggattatgctgcggagatgggattatctgagaatgaatatgccatcacgttgaatcaggaagtattgaaggaagacaaggctgttgccattgacggcagagtttatctgagtatggctctggtcacagaaaccatcaacagtcgtttttattgggatgacaatgagaagctgctgttgtttacaacgccgacagaagtgatgatgataaccccggatcagcaggaatatactgtgaagacatggaatggcagcagtgatgcggatgagggttacatgatcgtgcgtacttacaatgacagctgctatgtggctgcagattatgtgaaggcacatacgcagatggattatgccgagtatactgagccgaaccgtgttgtgatggctacaaagtgggcagaacaacagattgtaacactgaagaaggatacagcagtccgttataagggcggtgtcaagagtgaagtactcagacaggcaaccaagggagagaagatggtgcttcttgaagcctatgatgattggagcaatgtagctacagaggatggttatgtcggttgggtatccaataagacactgtatgacgcagagactgagacgcccgaggcgccggcatttgatgaaccggagtataccagcatccacaaggattataagatcaatatgggctggcatcaggtgatgagtgcagccgccaacagcaatttatcaagtgttctgacttcttcgccggggattaatacgctggcaccaacctggttttcattttctgatacaaatggcggtgtgacatctattgccacacaggattatgtggatacatgccatgcgaacaatattgaagtatgggcattgttttccaatgaatttccgggtgatgacggaacgatctacttcgattcatctaagacagatgaggttttgggatatacatctaagagggaacaggttatccgcaatgtcattggttatgtgaatcagtatggtattgatggtatcaatattgattttgagctgatttcacaggaaggtgcagatgactatattgagtttatcagagaattgtcgattgcctgccgtgccaacaacattattttgtccattgacaattacgtacctgagtacacctattattataatcgcagggagcagggaattgttgcagactatgttgttattatgggatatgatgagacgctgccaagttctgaaacaccggggcctgtcgcatcactgaattttgtccgaaaggggattacagatacattgaatgtcgtggataagtccaagattatcaatggtatcccgttctattccagagtgtggtgtacaaccccggacggcacagtcagtgcctttgcctgtggtatgtcagaagcgctgagctatctgacggatcatggtgtgacgccgcagttccttgaagatatcggtttgaattatggcagttatacttcggataaggatggcaacttctatgagatctggttgcaggatgcaacggccgttgaagaagagatgaaactcatcagagagtttgaccttgcaggggttgctgagtggaagattggttttgagagcggaacggatatttggaatacgatcagttcttatcttcaatag

SEQ ID NO: 2846 - DNA, 2058 bp, Coprococcus catus
gtgttatggtatgaaagcgttttatcagacgaagtaggaggcagggcattgattataaaacaattgaatctggaccattttggcaaatttcacggcagggagattgatctgaatcccggagtgaatattatttatggggccaatgaatcgggaaagtctacagtgcatgcgtttattcagagtatgctgtttggtgcggaacgccttcgtgggcgcggtgccggacgggatgcatattccaaatatcagccgtgggaaggcggagcaagctatgaaggacggatgcgcctgagttatcaggataaaaattggcggattgtcaggaatttctataaagatgacagtcattttgaggtggtcgatgagacgagcggacggcaggaagcatgcgcatcagatgatatttcatcactgataccgggaatgcagctttctaattatcggaattcaatcagtaccggccagctgtcggtccagccggatgggcagtttacgaccaatatgcagtcttatatggcgaatatggctatgggagctacggacagtgtggatgtgggacgggccctggcttatctgaaggatgaacgcaaaaaggcagctggaagattttctcaggagacttatcaccaataccgtgacaaagcagaaatgcttcgaaatgaattgaaagccagagaaggcattgcagagcggcagaaagctcttgaacagaatcgtgaaagcattttaaagcagatacagcaactggaaaatgatgcagatggcgctatgaaagcagatcggcaggaacgaatgaaagcgatacagctgatccaggagaataatgatgtggcggccatgtacaaagccaaaaaagcagaactcagagaatttgagggacagacaggcgggcagaagtatcagcagcagatgagtggtgtcgtggaagaatatgaagctcgacaggagaagctggaggattatcagtcgagatacagtgaactggaggaacagaatgaaggaagcagcattcgcaatctggcattgatattccctgtggctgcacttgctgtgatcgtctggattgccggcggtcttgtgggactgaaaggcattacacatattcttgccgctgttttgctgacagctctggcggtaggactggcagtatttctgattcggtcatccggcggcagaaaaggcagaatgaagcagctgaaagccgatatggatcgtctggagaatgagcagcaggcaattttggataaatatcagattgaggatatccatgaactcatggaaaagagccagaatcagagaagccgtcaggatgtggtactcagacttcggagagaacttgagcagctgcgtaaacggtatgatgagctgcagaaacctttggcaccgtatcttgagaaatatggggatagtgtaactttggaatcggctgcgggacaggagcagaaacagaagcttcaaaagcttcggggtcaggcgtcggagctgttgagacaatcggaacagatgaactggcagctggagcagctgaatatgaaacagtctgagctgagtgagctggaagaacagctgaaggtgcttgatgcagaccggaagatgagtgaggaagatatgcaggccattgacatcagcatgaatgcgattacggaaatgacggccagaatccatggatcttttggccttcagctggcagattatatttcacagcttttttcttatatttcaaacggcgcacataagaaactgaacattgatgagaagtttcaggtgacggtggatgatgacagaaaactgctgcagccgcagcaactctctgcgggaacggcggatcagatttatttttctgtgagaatggctgtcagtcagatgctgtatgatgaaccgatgccgctgatattggatgacagcttcgttttgtatgatgatgaacgtctgaaaaatacactcagatggctgacagaacagaaagctttcagccagatcctgatatttacatgccatcacagagaggctgagatgttggagagtttaaattgcgattatcattatgttgaattgtaa

SEQ ID NO: 2847 - DNA, 1857 bp, Coprococcus catus
ttgcgtctcactgaacttcgtatccgcaattacaagtccatcagcgacctgctgatcaccgatatcgaaaacgccctgattctcgtaggcaagaacaacaccggcaaaacggccattctcgatgccattcgtgttgtcaccggcagctgtgccgttgaaatggatgattttcaggaggattacgccaatatagaaatctccgtctgcctgctcttaagcgacaatgatttgaaaatgctccacgctgcaggtcaaatcagcacttaccgccgatttgacaaatggtttcaggatttcaaaagaaaactgccatcctatgatgaggcgtcccaggccctttcttttacatttatcgctaaccgcgacgggaaaatccgttacagcgacggatatcagaagaataacaactggattccccgactgctgccgccggtctattatctggacccgcagcgcaatctgcggcaatttcaggacgatttgctgctcatgcaggaagacagccttttaaaacaaatgcgttccggctgctgtctttttgattccgccaaaccatgcacccactgcttttcctgtatcggtctgatcaaccagaaaacacctgccgaattaaatgcctttgaagcggccagattgctggattacaagctgtatcagctgaatctggatgatttttccagaagagttaatgccaactacagaaaaaacggcggtcagcatgaaatcatctactccatgaaccgtgatatcgagcagatgctttccgttaccgctgaaattgcagatgaaaagcagaaaacgctgcgccctattgaacatatgggcaaaggcatgcgcagcatttatatgctttcgctccttgaaacctacgcagaagacgacaatccgaccccaggcatcattatggtggaggaaccggaacttttcctccacccaaaactccagaaactgtccggtgatcttcttttccgtctggcccgcaaaaatcaggtgattttttccacccattcaccgaatctgctgccgaatttcaacagccgtcagatccgacaggttgtattggacagcgatggctattccactgttcgtgaacatacagatatcagcgtcattctcaatgatctgggatacagcgccaatgatctgatgaatgtcgattttgtatttattgtcgaaggccgccaggacaaaagccgactgccgctgctgctgcgaaaatattactccgaaatatacgatgatgaaggcaagccttcccgtgtggccatcatcactaccaacagctgcaccaatatcaagacctatgccaatttgaaatacatcaaccagatttatctgaaagacagcttcctgatgatccgtgatggtgacggcaaagacgcggatatgctgaagcatcagctctgccgctattatgatgaaaggaatatcagtgatatcgaccatttgccaagggttacagagaaaaatgtcctgatcctgaaatattactcctttgaaaattactttttcaatccggatgttatggcaaaactcggcgttgttccaagccccgaagctttttatgatatattttacgaaaaatggcacgaatatctgcatcggctttccagtggagaaaaactggtggccgccatcggtcatgatttgacatcaccggaggatgtgcgtcagcatatggaagatatccgcatccacatgcggggtcacaatctctatgatacattctacggacgctataaagattccgaaaccgaattactgacccgctacatagaaatagcaccgaaagacgacttcaaagacatcctcgatgctattgaccattttatttacttcgaaaatcgccggaaataa

SEQ ID NO: 2848 - DNA, 2181 bp, Coprococcus catus
atgaagaatattctgcgtgtttttaagaatgacttaaacaagattcataataacgttattgccatgatcgttatcatgggtattcttgttattccgactctttatgcatggttcaatattgcagccagctgggatccgtatggcagtacggatggcctgaaaattgccgtggccagcgaggatgcagggtatacaagtgaactgatcaacgtggatctgaatcttggtgatgatgtcattaaggcattgaaggaaaatgacaatttcaattgggtctttacggatgcagatgatgcagccgatggtgttaaatccggcaaatattatgcgtcccttgttattcctgaggattttaccaaggatatgatgagtgtttttaccagtgatgtgacacatcctcagattatttattatattaatgagaaggaaaatgccattgcaccgaaggttactgaaaagggtgccagcgctgtacagcagcaggtgaatgacactttcattgaaaccgtttcaaaaacagcgctggaggcaattcagcttgtcagcaatgctgctgatgatgaagatgatcaggagttggcagacaaactgtcaaaaaccctgaaccaggtagcttttgatttgagcagtgcggccaatacggtgcagtcctttgccaatctgacgcaatcaggtgcgctgatgttggattcaaccactgaatttctgaagcagtccggctccggtgcagaaaacagtgtcgaggcctttgataaagccggtgaaggcattgattcattaaacagtgctttgacaggtaccacaaagacgatttctgatgcattggcacagaacaaggaattctatacagctgtgtcagatgcggtgggcaaagcgctggattcttataatacagatgcggaggcatcagcagatgctttatatgccgtatcagacagaatccaggatgtgatcgaccgctatacagagatagaaaattccctgacagacatcggcaatgattttgattccctgaagattttaaacacagctatcagagatattaatggtttgatcgatacggcgattgcaagacagacagccattcgggacaagatcaatgaagccgccggcagtctgacaacactgacaggggatgcatcggatctcaagaaagaaataaatgatttgatcgcacagacaacggattctgttgaagaagtaaagacaagctatgaagagaatgtcaagagtggtctgaatgatttggcaggcagtctgtcatccacagattcttccattacatctatgttcacagcgttgaatgacagtgtccaggatattgcaggtgtcaccgacaatgcatccggggatctgtcggatgttcagaaaacattggaagattcggtgaatctgttaaaagatgcttctgacaaacttaccacagcatccaggaaagtatcagacagcggcagtatggatgccctgaccgatcttctggaggaaagtcctgagagcatggcttcattcattgcttctccggtaaaacttcatgagaaccagatttatccgattgagaactatggttctgcaatggcaccgttctattcaacactggccatctgggttggtgcggttgtaatggcggctatgctgaaagttactgtgtcagagaatgcgaagaagagactaaagaatccaaaggaacatcagctttattttggacgaatgatcctgatggtttgcctcggtattctgcagagtgcactgatctgtctgggagatttgtatttcctcggtattcagtgtgaacatccgttgatgtttattatcacgggctgtttttcaagtctgatctatgtcaatattatttatgctttgacggtttcctttggcgatatcggtaaggcagttgctgttgtactgatggttatgcaggtagccggaagcggcggtacattcccaatcgaatgtgcaccgaagttcttccaggttgtatatccactgctgcctttcgtacacagtatgaatgcgatgcgtgagtgtattgccggattctatggcaattattacatggttgagatggctaagatggcattatatctgatcccgtcactgcttctcggtctgcttctcagaaagccgattgtccgactcaatgaagcgtttatcgaaaaacttgaaagtacaaaactgatgtaa

SEQ ID NO: 2849 - DNA, 1818 bp, Coprococcus catus
atgaaaaatacttttcaccggctgatcgccggtctgattgccgcatctgtgcttctgtgcggctgctcatccgccaatatgctcacatccgctgcggcccatgagctgtacgatcaacgttacagtgtcggtacaaccaggggcgaagtcaatgcggatttcgatgattttacacgggaaatttttactgatgcagtcagcacagatgccctgaccctgcattttgagctcaaggatccttcagcctatgatattgaccttgataccattgaccttggacgtattaatctgcagaatcccatcgatacatttgtctccgacatcagtaccgatgcgctcagacaggagcttcacgattttgactatgaagaactcacagagaaacaacagcagacttatgatattctcgatgaatttctggaaacagagcaaacctatgacagcaaaaccctgttttactatccggaatatctgagcagcacctccggcacccagagcctgctgccggttatgatgtctgaatatgctttttacagccctgcggatgtggatgattatctgcttctgcttcaggattttccggactgctttaacaatatacttgattatgaacaggaaaaagccgatgccggcctctttatgtctgatgaatctgcggatgaagtcattgcttcctgtcagtctttcattgaaaaccccgacaacaacatgctgattgaagtctttcctgaaaaactcgaatcggtttccggtctgtccgacagcgacaaagcagattatatcaagcgaaatgaccaggccgtccatgattatgtcattcctgcctaccagtcactgatcaaaggcatggaagctttaaaaggcagcggtaccaacgagaatggcctctgttattttgaccatggcaaagaatactatgaatatcttgtcaaaagccagacaggctccgacaaaacccccgaagaactgattgaatggctggatgatacgctgcagaatacaatagttcagatggcattgcttctgtcatccgatgacagccttgccgacaaactggatgaggccattgatatttcagagaacgacccgaagattattcttcaaacccttcagtcctcgctgaaagaagattttccggatgcagtttccagtcaatatacactgaaatatgttcccgaatcattggaagacagcatgaatcccgccttttatatgattccgcctgtggatgtcactgacagcaatgtgatttacctgaataacagccagattactgacaatctgtccctttttacgacactggcccatgaaggctatcccggacatctctatcagcaatctgccttctccgccacagacccggatcccctgcgccaggctatgaacttccttggttatgtggaaggctgggccacttatgccgaaaatatgtcttacacatggaccggtctggatgacaatctggcccgctgcctgcagctcaatcaggatatcacgctggcactctacggccggatcgatcttggcattcactatgagggctggaccactgacgatgtgacggaatttctgtccgactacggcctcgacgatgacgaaaccgttcattccgtttttcgcgccattgtctccgatcctgcctcctaccttccatactgcatcggttatatggaatttaaagaactcagagatgataccgaagaaaccatgggtgatgattttaatttaaaagaatttcatcaatgtatcctaaacatcggaccatgttcctttgatgttttagagaaatatatacaaaaagattatattagagcttga

SEQ ID NO: 2850 - DNA, 1650 bp, Coprococcus catus
atggcagtaaaatacgtatttgtcacaggtggtgtcgtatccggtttaggtaagggtatcacagccgcttctctcggaagacttctgaaatcccgcggttactttgtcaccatgcagaaattcgatccatacctgaatattgaccctggtacaatgaatccatatcagcacggagaagttttcgtcactgatgatggtaccgaaacagacctggatctcggacattatgaacgttttatcgactgttccctcaacagccgctccaacgtaacaagcggcaaggtttattgggatgtcctttccggcgaacgacgtggtgattacggcggcagtactgttcaggttattcctcatatcaccaatgccattaagagccgtttttatcggaaccctgcttcccgtgaaaccgaaatcgctatcattgaagttggcggtactgtcggagatatcgaaagtcagccatttctggaatctatccgtcagttccagcatgaaatcggccgcgagaactgcatgctgattcatgttaccctgattccatatatcaaatcctccggtgaaatgaagacaaaaccaacacagaatactgtcaaggatcttcaggctctcggccttcagccggatgtcattgtctgccgttccgaactgcctctggatgacggcatcaaagacaagatttctcttttctgcaacgtagatgttcacaatgttatcgagaatctggatgtggatgtactttatgaagcacctctggctctcgagaaagagaaactggcacaggttgtctgcaaacgtctcggtattgactgtcctgaaccggatcttgatgactggaaagcaatgatccatgcatggaagaaccctacaagaaaagtacgcatcgccctggtcggcaagtatgtccagctgcatgatgcctacatcagtgttgttgaatccctgaagcatgctgcatgtgccaacggcgcagaagtagagatccagtgggtagattccgagctggtaagttcattcaatgttgccgatattctcaaagacgccgatggtattctcgttcccggcggttttggtgacagaggtatcgaaggcaagatcactgctattgaatacgcccgtacacacaatgtaccattccttggtctctgccttggtatgcagatggcaatcgttgagtttgcccgccatgtactgggttatacagatgcacacagttccgagctgaatccgaacacaacacatccggtcatccatattatgcctgatcagcacaatgtgacagatcttggcggtacccttcgtctcggtgcatacaaatgcgtccttgatgaaaactccaaagcctatgcgctttacggcgagaaagtcatcgaagaacgtcacagacatcgttatgaagtcaacaatgaataccgtaatgttctcacagaaaacggtatgcagctctgcggtatttcccctgatggccgtatcgttgaaatgattgaattaaaggatcatccatggtttattgccactcaggcacatccggaattcaaatcccgtccgaataaaccgcatccgctgttcaagggctttattgaagccgctctgaagtatgaagacatccttcaggccgaagctgaagctgaatcacctgctgatgctgaataa

SEQ ID NO: 2851 - DNA, 831 bp, Clostridium clostridioforme
cggcaccaccctggtggtgaccctgccggtgaaaagagaggaatcagacggatgttgcgtgtgttgattgcggaagacgaagagatgatacgaaaggggctggtctataccacggactggctgtccatggactgcgtggtggtggcggaggccgccgacggccgggacggatatgaaaagattctggaatacaggccggatgtggtcataacggatatctgcatgccctttatggacggcatagagatgataaagaaagcctcggagcaggtaaggtttaagagcatcctcctgaccagctacgcggattttgagtatgccaggcgcgccatcgaggccagggtctgcgagtacctgttaaaacctgtggacgaggaagcactggcagatatcatggaacggctgggggaggaaatcgtgaacagccgccaggtggagcatgtgatggagcaggcggagatagaggggggcaacctgaacctggagtactacatgcagctggatttgtcggagaaccagtatgtatccagggccataaaggccatacgggaggattttgccaggaagctgagcatagaatccatctcagatgacctgggggtcagcgccagctatctgagcaggaaattcaaggaggtcacggggcagaccttcctggactttctcaataaatacagggtacagcaggccatcgtgatgctgggcaccagacagtacagaatcagtgagatatcagaggccaccggatttacggactacaagcatttttgctccgtgttcaaaaaatatacctccaaatctcccacaaagtttatcaaaggagtgtcgtga

SEQ ID NO: 2852 - DNA, 1509 bp, Clostridium clostridioforme
atggcagataagaaagatgatatcgtcttatcaatacgcggtatgagcaagtccttcggccggaacagagttctggaccatatcagcctggatgtgaagcgcggaaccgttatggggcttatgggtgagaacggagctggtaagtcaaccatgatgaagtgccttttcggcacctaccagaaagacgagggaaatatcttcctgaacggcagggaagtaagcttttccggaccaaaggatgctcttgaaaacggcattgcaatggttcaccaggaattgaatcagtgtctggaacggaatgtaattgacaatttattcctcggacgttatccggtcaattccatgggtgtaattgatgaaggcaggatgaaaaaggaagcagccgaactctttagaaaattgggaatgaccgttaacctcactcagcccatgagccgcatgtccgtatcacagaggcagatgtgcgaaatcgccaaggccatctcctacaattcaagggtgattgttctggatgagcctacatcctccctgaccgtgcaggaggttaataagctcttcgagatgatgaggatgttaaaggagcagggaatcgccctgatttatatttcccacaagatggatgagatttttgaaatctgcgatgagatatcagtgcttcgggacggcaatctggttatgacaaagagcaccaaggatgcaaacatgaatgagctgattgcggcaatggtcggccgttcccttgataaccggttcccgcctgttgacaacacccccggtgatgtgattctgtccatccagaatctgtccacaaagtttgagcctcacttgcaggatgtttcatttgacgtaaaagaaggagaaatattcgggctgtacggtctggtaggagcagggcgcacggaacttctggaaacaatctttggtgtccgcaccagagcggcggggcgtgtttattttaataaccgtcttatgaatttcagcagcgcaaaggaagccatggagcatggttttgccatgattaccgaggagcggaaggcaaatggcctgtttttaaaaggggaccttacctttaataccaccattgccaatctgcggcagtatatgtcgggcatagcgctttccgatgcgaagatgataaaggccacgtcaaacgaaatcaagatcatgcacaccaagtgcatgggccccgacgatatgatttccagcctttccggcggaaatcaacagaaggtcattttcggaaagtggctggagcgcagtccgcaggtgtttatgatggacgaacccacacgaggaatcgacgtgggcgcaaagtatgaaatatatgagcttatcatcaatatggcgaagcaggggaagacaatcatcgttgtttcttctgagatgccggagattctcggaattacaaaccgtattggtgttatgtcaaatggacgtctttccggaattgttaatacaaaagagacaaatcaggaagaacttttaaggctcagtgcaaaatacctataa

SEQ ID NO: 2853 - DNA, 978 bp, Clostridium clostridioforme
atgaaaagtcgtacaaatattaagaggtttttagtggattgggctgcggtcctggcattgcttgtttgctttattgcgtttacagtctataagggcaattcctttatgtcaacaagcaacatggtaaatattctcagggcaatggctattaatacggtgtttggtatagcggccaccatcaccatggcgccggatggttttgatatgtcagccggaacactggccagctgttctgcttatgtgtttgtgtctgcgtatctctggctgggacagtcgttgggaatgtcaattcttatctgtattctggctactctggttatgtaccagctgaccatgttcctgattcttgtctgcaagattccggatatgcttgccacctgcgccctgatgtttgtccatcagggaatcggccagtggtatataggcggaggcgctgtttccaccggcatgaagacttcctggggagcggcacctgcacgtaccgcgctttcagaatcattttcagccattggacgcgctccgtggatcattatcatcatgctgggctgtgtgcttgtggcctatcttttcctcaactttaccaagcacggccggtatctctacgctatgggcggcaataaggaggctgcaaagctgtccggtatcgatgtaaagaaataccgctatctggccggtatgattacagctgtgttcatcgccatcggcggtatcctggtggcatccaggggaagctctgcacaggttatgtgctgtgataactatttgatgccgtcactggcagctgttttcgtcggacgtaccgtgggcggcgctgagaagcctaatgcactgggaaccatgataggagccatgctggtttccacactggagaacggccttaccatctgcgcggttccgttctatgttctgccggcagtgaagggttctgtcctggcacttgcgcttattgcagcttatgcatctaagaaagaagattaa

SEQ ID NO: 2854 - DNA, 801 bp, Clostridium clostridioforme
atgtttacgacccggttaatcagcggtatcatactggtgcttctgtccatcgtcattgttgggcagggaggtatcctgctatatgccgttacggcccttatatccatcatcggtttatttgagctttacagggctctgggaatgcagcggcgttccctggctgttgtgggctatgtgacggcctgctcctattatggacttttgtggtttgagggacagcgctatgtgacgcttatgattatcgcctgcctgatggcgatgatggccctttatgtgcttaccttccctgaatataagacagaggaggtgacgggcgcgttctttggcgtatgctatgtgcccatcatgctgtcattcctgtatcagacaagggtcatgaacgacggggcatatcttgtgtggcttatatttttaagctcctggggctgcgatacctttgcctactgtacaggcatgcttttgggcaggcataagctggcccctgtcctgagccccaagaaatccattgagggggctgtgggaggcgtggccggcgcggcccttctgggctttatctacgcgtcccttttcggaggcagaatggcggagcttgataatccccaggcagcctgcgccattgcctgcgccattgcggcggttatttcccagattggggatttggcggcttccgctattaagagaaatcacaacataaaggattacggtcatctgattccgggtcatggaggcatcctggaccggtttgacagtatgatattcacggccccggccatttattttgccctcacatttttaaaataa

SEQ ID NO: 2855 - DNA, 1440 bp, Clostridium clostridioforme
atgctcataacaaggaggattataactatggcagagatagaaaagaggccagtgaagattgtggaaaccgtccttcgtgacgcccaccagtctttgctcgcaaccagaatgtccacagagcagatgctgcccattatcgataagatggacaaggtaggctaccatgcggttgagtgctggggcggagctacctttgattcctgtctccgtttcctgaaggaggatccatgggagagactgaggaaactgagagacggatttaagaataccaagctgcagatgctgttccgcggacagaacattctgggatataaccactatgcagacgatgtagtggagtattttgtacagaagtccatttccaacggtattgatatcatccgtatctttgactgtctgaatgatatccgcaacctggagacagctgtgaaggctaccaacaaagaaaaaggacatgctcagattgcgctgtgctatactttgggcgatgcctatacactggattactggaaggatattgccaggagaattgaggacatgggcgctgactccctgtgtatcaaggatatggcaggtctgctgactccatatgcggcagcagagctggtacaggcgctgaaggaaggaacaagccttcctatcgacctgcatacccactacacatcaggtgttgcttccatgacctacttaaaggcagtagaggcaggatgcgaaatcatcgactgcgccatgtcacctctggctctgggaacaagccagccggccactgaggttatggtggagacgttccgcggcaccccctatgacactggctatgaccagtcattgctggctgagattgcagaccatttccagcccatacgtgagcaggcccttaagagcggccttctgaacccgaaggttctgggagttaatatcaagacccttcagtatcaggtgccgggcggcatgctttccaacctggtaagccagttaaaagaggccggacaggaagacaagtaccgcgaagttctggaggagattccgagagtgcgtaaggacttcggtgagcctccgttagttaccccgtcatcccagattgtgggtacacaggctgttatgaacgttattatgggcgagcgctataagatggttccaaaggaatccaagaaaatcatgcttggcgaattcggccagacagttaagccctttaatccggaagtgcagaaaaagattatcggcgacgagacaccgattacctgccgtcccgccgacctgattgctccgcagcttcctcagtttgagaaggaatgcgcacagtggaagcagcaggatgaggatgttctcagctatgcgctgttcccggcagtggccaaggatttcttcgagtacagggctgcccagcagactaaggttgacagcagcgcggccgacaaggacagcaaggcttatcctgtttaa

SEQ ID NO: 2856 - DNA, 762 bp, Clostridium clostridioforme
atgagattatcaaagattacatggccaacagcggaacggtattttaaggaaaatgacatggtcattcttccaatcggcagtacggagtgccatggacgccatatgccgctgggaaccgacaccctgatacctgacaaaatcctggatctgattgaggaaaagaatgacaacatcctcatcgcgcccatgattccctacggagcatgccagtcactggctgattatccgggaaccatcaacattgattccgacgtactgtaccagtatgtataccagattgtggacgggctgtacaagcacggcgcacggaaaattctggtgctcaacggacacggagggaatatcaagaccatcgagcgcatcggcctggaatttgacaagaagggcgccatggtcgtgatgctgaactggtggctgatggcctgggatatgaagccagagtggaagggaggacacggcggcggcgaggagacagcgggcatcatggcagttgacccctcactggtggacatgagccagattgaccttcctctggaaatgaccaatctcacagacaatctggtggcaaccggcttgcgtaccgtgcgcttcaagggtgttgagattgaaattctcaggaacacaccaaaggtaacggacaacggatggattggaccagatcatccaaacaccgctaccgtggagtggggccaggagatggtacagaccacagccgactatatcctggatttgatcgaagagcttaagaaggtttcactgtaa

SEQ ID NO: 2857 - DNA, 1209 bp, Clostridium clostridioforme
atggctaacaattttgtattcaaagattcccttcccgtagcgcctttaaaaatcgccgcactggaaagctgtaagaatcttgcagccaaggtgaacgaccatattgtacaattcaggcgcaatgatatagaggaactgatgcgccgcaaggaggaccttcactaccgcggttatgacgtggattcctatctgcttcactgcagctgtcccagattcggaacaggcgagggcaaggccgtcatcaatgaatccgtaaggggcacagatgtttttgtcatggtggatgtgatgaattacagcattccctatacggtaagcggttataccaaccacatgtcgccggacgaccattttcaggatttgaagcggattatcggggcctgctccgccactgcccacagggtcaatgtggtcatgcccttcctatatgaaagccgccagcacaagcgcagcaaacgcgagtccctggactgcgccatggctttagaggagctggcagccttgggtgtggaaaacatcatcacctttgacgcccacgacccgcgggtacagaacgccatcccgctgattggctttgacaatttcatgcccacgtatcagtttgtaaaggccctcttttcccatgattccaacatccgtattgacaaagaacacttaatggtcatcagcccggacgagggcgccatgaaccgcgccgtataccttgccaacaacctgggtgtggacatgggtatgttctataagcgcagggattattcccaggtaatcggcggacgcaacccaatcgtggcccatgaattcctgggttcttccgtagaaggaaagaccgtacttatcatcgacgatatgatatcctccggcgaaagcatgctggatacctgcaaggagttaaaggaacacaaggctgacaaggtcattgtatgctgtaccttcggtctcttcaccaacggccttgagaaatttgatgagtactaccaccagggatatctggattatgtcatcaccaccaacctgaattaccgcacccaggaactgattgacagagagtggtatctggaagccgacatgagcaaatacctggccgctgtcatcaactccatgaaccatgaccgctccatcagcgcctccctttctcccacggagaagattcagaagctggtccagaagcgtcagaacggcggatacgagtatttccagaagcttgtataa

SEQ ID NO: 2858 - DNA, 1695 bp, Clostridium clostridioforme
atgacccctcttttactagaaatatcaacagaacagattaagagaaaggtaacgaacatgattagtacaagcaacatatctcttcgcgtgggcaagaaggcattgtttgaggatgtgaatattaaattcaccgagggcaactgctacggactcatcggcgcaaacggtgccggaaagtccacattccttaagatcctgtcaggccagttggagcctaccagcggcgatgtcataatcacccccggacagaggctgtccttcctgcagcaggaccactttaagtatgaccagtacacggtcctggatacggtcatcatgggaaacaagagactatatgagataatgaaggaaaaggaagccatctacatgaaggaggacttcacggacgaggacggtatcaaggccgctgagttagagggtgaattcgccaacatgaacggatgggaggcagagtcggatgctgaaagccttttaaacggacttggcattgagccggacctgcactatgcgcagatgagctcccttctgggcgctcagaaggtaaaggtgcttcttgcccaggccctgttcggcaacccggacattctgcttctggatgagcctaccaaccacctggacctggacgccattgcgtggctggaggagtttttgattaactttgagaacaccgttatcgtggtatcccatgaccgttatttcctgaataaggtctgtacccagatagctgacattgactatgggaaaatccagctgtacgcaggaaactacgacttctgggtggagtccagccagctgattgtgaagcagatgaaggaagccaaccgcaagaaggaagagaagattaaggagctgcaggaattcatccagcgcttctccgccaatgcttccaagtccaagcaggccacttcccgtaagcgggcccttgagaagattgagctggacgacatccgtccttccagccgtaagtatccgtacattgatttccgtcctttccgcgagatcggcaacgaggttctgaccgtggagcacttaagcaagaccattgacggcgaaaagatactggacgatatctccttcatcctgggccgcgaggacaaggctgccctggtaggaccaaatgagcgggccaagacagtgctctttaagattctgtccggtgagatggagccggatgggggaagctataagtggggtcttaccacctcacaggcatatttccccaaggacaacagcgccgagtttgacaacgacgacaccatcgtagagtggctgacccagtattctcctgagaaggacgtgacctatgtccgcggtttcctgggacgtatgctgttcgccggtgaggacggcgtgaaaaaggtgaaggtcctttccggaggcgagaaggtgcgctgtatgctgtccaagatgatgatatccggtgccaatgtgctgatgctggatgagcccacggaccatctggatatggagtccatcgacgctttgaaccgcggtatgattaagttcccgggcgtgatgattttctcctcccgtgaccaccagatagtgcagactactgcaaaccgcatcatggaaatcatcaacggcaagctggttgataagattaccacctacgacgagtaccttgaaagcgacgagatggcacgtaagagatttaccttcacactgactgagagtgaagaggcagatgattaa

SEQ ID NO: 2859 - DNA, 1530 bp, Clostridium clostridioforme
atgtatcagaacaacaagaaggagggtttttttatggcaaagtatgtaatggcactggattcgggtacgacaagcaacaggtgtatcctgttcaatgaaaagggggaaatgtgcagtgttgctcagaaggaatttacacagtacttcccgaagccaggctgggtagagcacgatgccaatgaaatctggtccacacagttaggcgttgcagtggaggctatgtccaaaatcggggctaccgcagaggatctcgcggccatcggcatcactaaccagcgtgagaccaccattgtttgggataaggagaccggggagcccgtataccatgcaatcgtgtggcagtgccgcaggacctccgagtactgcgatacactgaaggagaaaggattggtcgataccttccgtgccaagacaggacttgtgattgacgcttatttctcaggaacaaagctgagatggatacttgaaaatgtggaaggagtcagggaacgcgcagaaaaaggggagctgctgttcggaaccgtggagacatggctgatctggaagctgaccaagggcagagtacatgtaaccgattattccaacgcatcacgcaccatgctgttcaacatcaacacactgcagtgggatgatgagattctggccgagttaaacattccgaagtgcatgcttccggaagcaaaaccatccagtttcgtatacggtgaatccgacccgcagttctttggcggcccaatccccatcggaggggcggcaggcgaccagcaggcagcgcttttcggccagacctgtttcaatgcgggcgaggcaaagaatacatacggaaccggctgcttcatgctgatgaacacaggcgagaagccggtgttctccaagaacggcctggttaccactattgcctggggcctggacggcaaagtgaattacgctctggaaggttctatcttcgttgccggcgccgccatccagtggctgagggacgagatgaggatgatagattcctcgccggattccgagtacatggctaagaaggtaaaggacaccaacggctgttatgtggttcccgcgtttaccggactgggagcgccgcactgggatcagtacgccagaggcactatcgtgggcattacccgcggtgtcaacaaataccacattatccgtgccacactggattccctgtgctatcagaccaatgatgtgctccaggccatgaaggcggattccggcatagagctggcagcccttaaggtggacggcggagcaagcgcaaacaactatctgatgcagacccaggcagatattatcaatgctccggtgaaccgtccccagtgcgtggagaccacagccatgggcgctgcctatctggcaggtctggcggttggatactgggctgacaaggaagaagttatcaagaactgggccatcgaccgcacctttactccggagatttcagaggagaagaggactgagatggtgaccggctggaacaaggccgtgaaatgctcttatggatgggcaaaagaggattaa

SEQ ID NO: 2860 - DNA, 348 bp, Clostridium clostridioforme
ttgggacatggagaaaacagccggtcccctcaggcgggacagacaggcgccgggagagaagaaatggaagaaaagacgagagaaaatatgattaccatggtgacggattcaggggaatccgtggatttttatgtgctggaagaaacaaggataaatgcaaggagttatctgcttgtgacagacgcaccggaaggtgaggacggagagtgctatatccttaaggatatgtcaggacagcaggacgctgaggccgtgtatgagtttgtggaagacgacagcgaactggacgcactgatgaaagtgtttgaagaactgttaagcgatgcagatgtggaccttgagaaatag

SEQ ID NO: 2861 - DNA, 867 bp, Clostridium clostridioforme
acggtgcctgggcagcagtttgccaggtcttccgggaagtgtcagaagcaggcggaagagcctgaactcccatacgcgacggagcaggctaaaaaccaaatggaggtaaataacatgagcgtaatttctatgaagcagttactggaagctggtgtacatttcggtcaccagacaaggagatggaaccctaagatggctccatacatctataccgagagaaacggtatctatatcattgacttacagaagtccgtaggcaaggtagatgaggcttacaaggccgtatctgacattgctgctgacggcggcaccattctgttcgtaggtaccaagaagcaggctcaggaagctatcaaggctgaggcagagcgctgcggaatgtactttgtaaacgagagatggctgggaggcatgctgaccaacttcaagaccatccagagccgtattgacagactgaaagaaatcgagaccatgtctcaggacggaacattcgatgttcttcctaagaaggaagtaatcgccctgaagaaggagtgggacaagttagagagaaaccttggcggaatcaaggatatgaagagactgccagatgcaatcttcatcgttgacccgaagaaggagcacatctgcgtacaggaagctcacacacttggtataccgttaatcggtattgttgatactaactgtgatccggaagaactggattatgtaattcctggcaatgatgatgccatcagagccgttaagctgattgtttccaagatggctgatgctgttatcgaagcaaagcagggcgaagttttagagggcgcaatggaaatcgagattcctgcccaggctttcgagacagaggctgttgaggcttaa

SEQ ID NO: 2862 - DNA, 510 bp, Clostridium clostridioforme
atgagtctgttaggtaagttaatggataccatgagattaaatcctgatgaggaagaggatgattactacctggacgatgactttgaagaggaggccccgcgcaagggactgttctcaaagaagaatacggaatatgatgatgaggaggagcaggacaagccccggtttttaggaagatccaatcccaaagtagtacctatgagacgcagcatggaagtgacaatgattaaacccacatccatggaggattccagagacatctgtgattaccttctggctggcaaggcagtggtactgaatatggagggtatacatacagaagtggctcagagaatcatagatttcacctcaggagccacctattccatgaacggcaatctgcagaagatatctaattatatcttcatcgcaacacctgattccgtggaactgtccggagatttccaggacattctggccgcaggcggcgccatgggcatggacgtttcaggactcaatatccatttgtaa

SEQ ID NO: 2863 - DNA, 1137 bp, Clostridium clostridioforme
aaacaaaatacaaatcaaggaggtttacgtattatgaggaaaaaaggattaagcgttatgttatgtgcagcaatggcagcatccctgctggcagggtgcggcggcggaaataagcctgcagagacaacagcagctcccgcagcagctgagacaacggcggcagcagccgacaccacggcggctcctgagaagtcagaggctgagacagaggcagaggcaaaggatgacgctgcatccggtgatttgattgtggttggttatgcccaggttggcgctgagtctgactggagaacagctaatacagagtccttcaagtccacctttacagaggaaaacggctacaagctgatttttgacgacgcacagcagaaacaggagaaccagattaaggccatcagaagctttatccagcaggatgttgactacatcgtagtggctcccgttgttgagacaggttgggaagcagttctccaggaagcacaggaagcaggcattccggttatcctgtccgaccgtcagatggacgtggatgaaagcctgtatgagtgctgggtaggcggcaacttcatcaaggaaggcgagacagcaggaaactggctggctgattacttaaaggcacagggaagagacggcgaggacatcaacatcgttactcttcagggaaccatcggagcatccgctcaggttggccgtacagaaggtttcggaaacatcttaaaacagcatgacaactggaaaatgttagatatgcagacaggtgaattcacacaggctaagggccaggaagttatggaatccttccttaagtcctatgacgatattgatgtggtagtagctgagaacgacaacatggcattcggcgctatcgacgcaatcaaggcagccggcaagacctgcggacctgacggcgacatcatcatcttctccttcgacgcagttaaggcagcatttgacgccatgatagccggcgatttaaacgcggcatttgagtgcaacccgttacacggaccgcgtgtagatgagatcatcaagaagctggagaagggcgagaccgttgagaagattcagtatgtagacgaagcttacttcgatacatccatggatttagagtctatcaaggctgagcgtgcttattaa

SEQ ID NO: 2864 - DNA, 1146 bp, Clostridium clostridioforme
atggattttggcaatataattaacaacctgctggaccagatggcctttttccatctggaagcaggcaactatgtaatgatcgtagtggccctggtgttcttataccttgctatcaaaaagggatttgaacccctgctgctgattccgattgcattcggtatgctgctggtcaatatttatccggatatcatgtattctccggaacagacgtccaacggaacaggcggacttctgtggtacttcttccagctggatgagtggagcattttgccctcccttatcttcctgggcgttggagccatgacggactttggcccccttatcgcaaacccaatcagcttccttatgggcgcggccgcgcagctgggtatctactctgcttatttcttcgccatcctgttaggattctcaggcaaggagtctgcggccatctccattatcggcggtgcggacggccctacatccctgttcctgtgcagtaagctgggacagacccagatcatgggacctatcgcggttgcggcttactcctacatggcactggttccaatcatccagccgccatttatgaagcttctgacaactgagaaggagcgtaagattaagatggaacagcttcgtcctgtatccaagctggagaagattctgttccccatcatcgtaaccatcgtggtatgccttatcctgccgtccacggcacctcttgtgggaatgctgatgttaggcaatctgttccgtgagagcggtgttgtgaaacagctggctgacacggcaagcaatgccctgatgtacattgtggttatcctgctgggtacttccgtaggcgccaccaccagcgcggaggcattcttaaatgtaactaccatcaagattgttgccctgggcctgaccgcattcatcttcggcaccgtcggcggtgtgcttttaggcaagctcctctgcaagattacaggaggaaagatcaatccgcttatcggttctgccggcgtgtccgcagttcctatggcggcccgtgtatcccagaaggtgggagcagaagcagacccgaccaacttcctgctgatgcacgcaatgggaccaaacgttgcaggcgttatcggcaccgctgttgcggccggtaccttcatggcaatatttggggtataa

SEQ ID NO: 2865 - DNA, 396 bp, Clostridium clostridioforme
atgcataaacgtattcagacactatgcataaaaacaggcgggctcctgggagccggcctgttttatgcatttatctgtattctggcgggacgtcccctgattccctgcctgtttcatacggttaccgggctgtactgtccgggctgcggcgtaagccggatgtgcctgtcccttctccgtctggattttgcatctgcctttcaggcaaatgcagccatctttcttctgctgcctccgggactgttcatggctgtctggatggccgtgcggtatgtaaggaccggaagcacacgccttacacgggttcaggcctgtgttttctatgtaatgattggggtgctgcttgtgtttggggtgctgcggaatctgcctgggtttgggtggctgcggccttga

SEQ ID NO: 2866 - DNA, 924 bp, Clostridium clostridioforme
atgagacatttattgaatcccttagacttctctgtggaagaaattgatgaccttctggcccttgcaagggacattgaacagaatcttccaggatacgcccatgtatgcgacggcaagaagctggccacccttttctatgagccaagtacacggacgcgtttaagctttgaggctgccatgctgaacctgggcggcagtgtattaggtttttcatccgccaattccagttctgcggcaaaaggcgaaagcgtggccgacaccatccgtatgatttcctgttatgctgatatctgtgccatgaggcatccaaaggaaggcgctgcattcgtagctgcccagaaggcccagattccggtcatcaacgccggagacggaggccatcagcatcccacccagaccttaaccgatcttatgaccatccgttccatgaagggacgtctggacaacctgaccgtgggcttctgcggagaccttaaattcggccgtaccgtacattccttaatcaacgccatggtccgctaccccaacgtcaagttcatactgatatccccgcctgagctgcgcatcccggacaacatccgtgacgacgtgctcactgcaaataatgttccctttgaggaagtcggcaacctggacgacgctctgggccagttagacattctctacatgacacgtgtgcagaaggaacgcttcttcaacgaggaagattacatccgtttgaaagactgttatattctggataagaagaaaatgaaacttgccaaggaagacatgtatgtgctccatcctcttcccagggtaaatgaaatctccgtggaagtggatgacgacccaagggctgcctacttcaagcaggcacagtacggcgtatacgtgcgtatggcattaatcatgagattactggaggtgcagaaaccatgttaa

SEQ ID NO: 2867 - DNA, 1050 bp, Clostridium clostridioforme
atgtcaaagttaagaattgttcattatattaaccagttcttcgctaacatcggcggcgaggaaaaggctgattaccagccagaattaagagaaggcattgtaggccctggtatggcgttcaaccaggcatttggagaagaagcagaaatcgtggctaccgttatctgcggcgactcctatttcaacgagaacgttgaagctgctaagaagaccattctggatatgatcagcagccagaagccagacgcagttatctgcggaccggcatttaatgcaggacgctacggcgttgcctgcggtaccgttgcactggcagttaaggaagaattaaacattccggttctgacaggtatgtacaaagaaaacccgggcgctgatatgtacaagacaaaagtatatatcgttgagaccaggaacagcgcagccggcatgagaagtgctgttgccaccatggctcctctggcaattaagcttgccaagggtgagaagcttggttcctccaaggaagagggctatatgccaaacggcatccgtgtcaacttcttcgaggacaagagaggctctcagagagcagttgagatgctggttaagaaactggccggcaaggaattcaccaccgagttcccaatgcctgatttcgacagggtagatcctaatccggctgttaaggatatggctcatgcaaaaatcgctttggttacctccggcggtattgtaccaaagggcaatccggaccacatcgagtcctccagtgcttccaagtacggcaagtatgacatagacggtgtcatggacctgacagaggccacatatgagactgctcacggcggatacgacccggtatatgcaaacgaagacgcagacagagtccttcctgttgacgttttaagagaatttgaaaaagaaggaaaaatcggcagcctgcacagatatttctatactacagttggcaacggtacatccgtagctaacgctaagagattcgctgcagagttcgcacaggagctgaggaatgacggggtagacgcggtcattctgacctctacctga

SEQ ID NO: 2868 - DNA, 2229 bp, Clostridium clostridioforme
atgaaatataagatagacgtggtgcgcatccgggagaattccattacccttaacggatgggctataggtaaatctccggacagcagggccaccttccgggtggaggatgagaagcacaagccggtaaaattcaagcatgtaaatactcgcagggatgatgtgagccagatatattttaagaaggtccttgaccgggaatttggatttgacatccagtttccctatgagcgggggaaggattattacctgctgatccgctgcgagggacgtcaggcaaaaatcaagtacaatgaggagctgattgccaagcgggccagcgtggcccacaagcgcatggagaagcttaaggacctgatgaacatggagacagtccatgtggccatggaattttggaaggagcacggccttaaggcccttgtggtcaagtcaaagcacaagctgcagggaattgacaatgattatgattacagcgagtggtatgagctgacaaagcccacagacgaggagctggcggagcagagaaagcatatatttgactttgagcccatgctgtccgttgtgattcccgcctataagaccccggagcgctatctcagggaaatgctggactctatcatggaacagacctatacaaactgggagatatgcgttgcggacggaagccccaggggagagggaccggaacgtgtgcttaagaagtacgcggaccgtgaccggcgtgtgcgctatgagattctgggcagcaaccgcggaatctcaggcaataccaatgcagccctggatatggccaggggagactttgtcatcctggctgaccatgacgatacacttcctcccaatgctttttatgaggtggtgaaggcaatcaatgaaaatccggactgccaggtcatttattccgatgaagataaactggacatggatggaaaggctctcttcgaccctcatttcaaaccggattttaacccggatttgctgaccagcgtcaattatatatgccatctgttcgtcataaggcaggatttgttaaagcaggtgggcggattccgccaggaatttgacggcgcccaggattatgatttcattttccggtgtacggaggccgctaagagagtataccacattcccaaggtcctctatcactggcgttgccatcagaattccacggccagcaacccggagagcaagatgtatgcctttgaggctggttccagagccatcatggcccactatgagcggatgggaattccggcggtgacggtggagaagggtgtggattacggcatttaccataccacgtttgagatacagggtgaacctctggtgtctgtcattatccccaataaggaccacagccaggacctggatgtgtgcgtgcggtccctgatggagaaatcatcgtaccggaacctggaattcattatcgtggaaaacaacagttcccagaaggaaacctttgcctactatgataagatgcaggcggagcacagcaatttccgggtggtcacctggaaggagggcttcaattattctgccatcaacaattatggagtttcctttgcaaagggtgaatacctgctgctgctcaacaatgatacggagctgattgacggggacagtataaaagaaatgctgggattctgccagagggaggatgtgggcattgcgggagccaggcttctctatggggatgacaccatacagcatgccggagtggtcataggctttggcggcattgccggccatacatttatcggccttcacaaggcggagaacagctatttccacagggccatgtgcgcccaggactacagcgccgtcacggcggcctgtctcatgacaaagaaatccgtctttgaccaggtgggtggtttgagcccggagctggcggtggcctttaatgatattgattactgcatgaaagtacgcgccctggggaaactggtagtgtatgcgccttattcatgcttttaccattacgaatccaagtccagagggctggaggatacgcctgaaaagatagcccgttttaaccgggaggtggccatcttcatacggaagtggccggatatcattcaaaatggcgacccctgctacaaccccaacctgacgctgcgcaaatcaaattttgcgctcagggaccttctgaaggaaaaaataggtgagccttatgaccttaagatttaccaacagtttgcgccggaggacgatacgaaagcacatgagtga

SEQ ID NO: 2869 - DNA, 372 bp, Clostridium clostridioforme
ggcggcacaaggaaaaatcagtttaagagaaagatgaggaggatatgggtcatggcggcagaatatatgcatataggaatcccggtcctaaataaaaaagagggaatgacatataacgaggacatgaagttctgggtaagcaatgtggacgactatgattttaagatagagtacctgaaattcgaggagggaacacccttcccggagattctttccaagcagccccatgtggcttacagggtggacgatttggaccactatgcctcccaggctcagaggatcatattcgggccggctgactgcggtcctggcgtgcgcctggcatttgtaatctgggatgatgccatcgttgaactctatgaggaaaagtaa

SEQ ID NO: 2870 - DNA, 303 bp, Clostridium clostridioforme
atgcagggacagagaggacggagtgaacgccattccggggtattcctggacatggtgcacctgatacttgggattgccattgtaatcctggctgtgctgtcattcattaacccggagggaaatcatatgcttttccctctggtgtttttgctggcagcattgttaaatgcggtaaacggaatatttgagcttaagaccaggggaagggataagaaaaagttcggtgccagcatcctgcagctggctttggcggcaggtcttatggtccttggcatcgtaagcgccatcagtatctgggcatag

SEQ ID NO: 2871 - DNA, 735 bp, Clostridium clostridioforme
attatagttcaaaggggtaagcatatggttcctgagttgagaaaagaagagatactgaaaagtatcaaaaagagggatatctcttatataaaagacctggcagcggaattgaacatttccctgtccactgtgcgcagggatgtcgctgctctggaacaggaaggcagcgtcatcgtcatgcgcggaggcgcggttaagtataaggcggaggacttcgatgaacctgtggtaaagaaaaaactgattcacagcgaggagaaggagatcattgccaggaaggcggccgcgctggtggaggacggagactgcgtttacgtggattcaggcacgaccacggtggggatgcttaaatatctccagggaaaacgaatcaccattgtctccagcagcacggaactgctggacaatctgcccgtcaagaacgcgaagtgtatcctgctggggggagaggtgagggatgatttggaatccgttctgggcgccctgacggaaaagatgatatccgacatgtattttgacaaggcgttcattggcgccaacgggtatatcccggacggaggcatctacacctatgatgacagagaggccaggaaaaaggtgattgtaaaagaccattccaaggcggtctatgtgctgatggatacatccaagaagaataagtatgcgttctccaaggtgtttgatttgggggaggcggttctgattacagaggaggaagattcagaagattcatag

SEQ ID NO: 2872 - DNA, 531 bp, Clostridium clostridioforme
tatttaaggaggctgtacatgttagataaaaaggtagcagaacttattaacacacaggtaaacaaagaattttactccgcttatctgtatctggattttgccaactactacaaggacgcggagctgaacggcttttccaactggtaccaggtccaggcccaggaggaacgcgaccatgccatgctgttcatccagtatctgcagaacaacggagagaaaataacgctggaggccatcgccaagccggacagggtatttgaggacttcaggggacctctcactgccgggctggagcacgaaaactatgtgaccgggcttattcatgatatttatgacgccgcgtattccgttaaggatttccgtaccatgcagtttttggactggttcgtaaaggagcagggcgaagaggagaagaacgccagtgaactggtaaagcgtttcgacctgttcggccatgatcccaagggactctacatgctggattccgaactggcggcaagggtctacaccgctccctcactggtgctgtga

SEQ ID NO: 2873 - DNA, 801 bp, Clostridium clostridioforme
gagggaattatcgtgacaatcagtatgtttcaatgtttgttaatcggtctgtggacagccttctgtctggcaggcatgctgttcggaatttacaccaaccggtgcctggtcatggcagccggcgtgggacttattttaggggatcttcccaccggcctggccatgggagctgtaggagagctggcatttatgggatttggcgtatcccagggcggttccgtaccgccaaaccccatgggcccgggaattgtgggaaccatcatagccattaccatgaaggattccggtattgatgtgggctctgccctggctctttcattcccctttgcagtggctttccagtttgtgattacagccacctatacctttgccacaacccttacaagctatgcttataaggccctggataagaagaatttccgcggcttcaggatagctgccaatgcaacggtctgtgtatttgcagtggtcggctttattatcggattcggcggcgccttcagctccgagggactccagaaggtgatttcactgattcccgcatggctcagcgcgggtctgggcgtggcaggcaagatgcttcccgccattggctttgccatgattctcaatgtaatggcaaagaaggaactgataccatttgtactgtttggctatatcgccattgcctacctgaaccttcctgtcatgggagtggctgttatcggtacggccattgcgctgcttgtatttttccatgccggcaaaggaaacggcgaatctgtagaagaagtggaggttgaatttgaagatggcatttaa

SEQ ID NO: 2874 - DNA, 741 bp, Clostridium clostridioforme
atgctggaaggaaagattgcactggtaacaggcgcaagccgcggaatcggccgtcagattgcccttacactgggccgggaaggcgcagccgtaatcgtgaattataatggctctgcggcaaaggcagaggaagtagtgaaggaaatcgaagcagcaggaggcaaggcagaggcagttcagtgcaatgtttccgattttgagagctgcggcaggatgatggcggacatggtttccaggtatggccgtctggatatcctggtgaacaacgctggaatcaccagggacaacctgctgatgaagatgtcggaagaagattttgacgctgtcataagcacgaacctgaagggcgtatttaactgcatcaaacacatttcccgccagatgttaaagcagaaggcaggaagaatcatcaacatctcctccgtatcaggagttctgggcaatgcgggccaggccaattactgcgcggccaaggccggcgtcatcggcatcaccaaatcagctgccagggagctggccagcaggggaattacggtgaatgcggtggctcctggtttcattgccacggagatgaccgatgttctcagtgacagcgtaaaggcagctgccacggagcagattccaatgaagcatttcggaagcacgcaggacattgcagagacagttgctttcctggcttccgataaggcaggatatatcactggccaggtcttaagcgtagacggcggaatggccatgtag

SEQ ID NO: 2875 - DNA, 435 bp, Clostridium clostridioforme
accatgttaaacatcagcggattacaagaaggcattgtcctggaccacattgaggcaggaaagagcctggacatctactatcacctgggcctggacaagctggaatgccaggtagccatcatcaaaaacgcccgcagcaacaagatgggacgcaaggacatcattaaaatcgagggaggcctggatacggttgacttaaaggtattgggctacattgaccacaacataacggtgaacattatccgcggggacaagattgccgaaaagcgggcattaaagcttcccaagaaaatcaccaatgttattcagtgcaagaacccccgctgcatcacatccattgaacaggagcttccccatatcttctacctggcagatgagaaggcagaggtttaccgctgccagtactgcgaagagaagtacagcgaatttaaatag

SEQ ID NO: 2876 - DNA, 999 bp, Clostridium clostridioforme
atgagtgtaattgagacaatgattgacattcccgcagagcatgagcggaatgtctgcggacaatttgacacctacttaaagaagatagagcgcaccctgcatgtgaccatgattgccagggacggcgaaataaaaatcatcgggcctgagaaaaccataggccaggcaaaaagcgtgttcaacaacctgattgaactgtccaagcggggcaataccgtcacggaacagaacgtggactatgccctgtccctgtcttttacggagaatgacgggcagattttggagattgacaaggacatcatatgccggaccatatccggcaagccggtgaagccaaagacgctggggcagaagcattatgtggatgctatccgcaagaagatgattgtgttcggcatcggaccggccggcacaggaaagacgtatcttgccatggccatggctatccaggcgtttaagaacggcgaggtggggcgcattatccttaccaggccggccattgaggccggtgaaaagctgggatttttgccgggcgatctccagagcaagattgacccgtatcttcgccctctttatgacgccctgtaccagattatgggggcggaaagctatctccacaattcggagaaggggctgattgaggtggcgcccctggcctacatgagaggaagaacactggacaatgcttatatcatcctggatgaggcccagaacaccaccccggcccagatgaagatgttccttaccagaatcggttttggttccaaggtcatcataacaggagaccagacccagaaggaccttccgggaggcgaggtttccggtctggacacggcccttaaggtgctgaaacgaattgacgacattgggttctgttacctgaccagttccgatgtggtgcgtcatccgttggtgcagaaaattgtacaggcctatgagacatatgaacaaaagaataccccgcctgcaggacggcgcaggatacgggagcggaattaa

SEQ ID NO: 2877 - DNA, 711 bp, Clostridium clostridioforme
atggcagagaagcagaggattctgatcgtggatgatgatgcaaatattgcagaattaatctccctctacctgatgaaagagtgttatgagacaatgattgtgggggacggcgaggaagcccttaaggtatttccggaattcaagcccaacctggtactgctggacctgatgcttcccggtatagacggttatcaggtctgcagggagctgcgcgcttcctcccaggtaccggtcataatgttgtccgctaagggagagattttcgacaaggtactgggactggagctgggggctgatgattatatgataaaaccctttgattccaaggaactggttgcccgcgtcaaggcagtgctgcgccgttaccaggcagccccggccccggctccttcgtccaccgaacagcagggcgaatacgtggagtacccggacctgattgtgaaccttaccaattattccgtaatctatatgggccactccgtggaaatgccgccaaaggagctggagcttctgtattttctggcggcttcccccaaccaggtatttaccagggaacagcttctggaccatatctggggctatgaatacattggggatacccgtaccgtggatgtacatataaagcgtctgcgtgaaaagataaaggaccacaacagctgggccatcaccacggtctggggaatcggctataaattcgaggtgaaacgatga

SEQ ID NO: 2878 - DNA, 357 bp, Clostridium clostridioforme
gtgaacgatgtgattatcagacgtggagatatttattatgcggatttgcggccggtggtgggatcggaacaggggggagtgcgccctgtgctgattattcagaatgacgtgggaaacaagcacagccccacggtcatatgtgcggccattacatccaggatgaacaaagccaagctgcccacccatgtggagctgcccaccaggcgctgtgccatgattaaggattcggtcattctcctggaacagctgcgcaccattgacaagcagagactgaaggagaaaatctgtcatattgatgaggaactgcagcagaaggtggatgaggcccttatgattagcctggaactgcgtacataa

SEQ ID NO: 2879 - DNA, 810 bp, Clostridium clostridioforme
gagaggagaatctacgtgttccgagcagaggattatgtaaaagtggacagtctgtccgaggcgtatgaactatgccagaagcgcagcagcctggttgtgggaggcatggtgtggcttaagatgaccagtgtgaccaaacgtaccatcgtggacctgtccggcctgggacttgataaaatcgaggaaaccaaggaagaattcaggattggcgccatgtgcaccctgcgccagttggagacagaccaggggcttgaccagtatttcggaggcgtttttaaggaatgtacacgccatatcgtgggcgttcagatgcgcaacctggctacggtgggaggcagcatttacagccgctttggattttccgacatcctgacctgcctgatggccctggatacatatgtggagctttatcacggaggcatagtgcctctggaggaatttgccaaacggcctgtgcgccgggatgacagggatattctggtgcgcatcattataaaaaaagacggaagaaaagcagcctataccacccagagaaattcggaaacggatttcccggtcatagcctgctgtgtatcccggtggggcaatgactggtatgtggcggtgggagccaggccgggacgggcccaggtcgtgaaaatcaaggacgacgggtatgacagtctggcgcagcttgccggggaggcggctgattcctttacctatggcagcaatacgagggcaagcggacagtaccgccgccagctggctgctgtgtatacaagacgccttatggagagattgacaggaaggagcgtaagcaaaggatga

SEQ ID NO: 2880 - DNA, 1041 bp, Clostridium clostridioforme
acggatgtggtcaataaaataaagttgggagaggtaaaaattatgaagatgaagaaatttataaacaatcctgagaatctgacgccggagctgttagaaggctttgccgaggcacacaaggagctggtgaccctgggtgaaaaccgcatgatcattaacaataagctggctgaagccgacagggttactattgtgactcagggcggctccggccatgagccggctatcagcggatttgtgggagaaggaatggtggatatctccgtggtgggagatgttttcgcggctcccggacctcaggcctgcctggatgccataaagctggcagacaagggcaagggcgttctctacatagtcttaaaccatgcaggcgacatgcttaccggcaacctgaccatgaagaaatgcgcaaaggaaggattaaatgtggtcaaggtagtgacacaggaggatattgccaatgcgccccgctccaacgccgatgacaggagaggcctggtgggatgtatccccacctataagatagcgggagcagcggctgccgagggaaagagcctggaggaagtggctgccattgcgcagcggtttgcagataacatggctaccctggccgtagctgtatcaggagcgacccatccggcaacaggaagcctgctcgcggatctgggcgaggatgaaatggaaatcggcatgggacagcacggagagggcggcggcggacgccagaccatgaagtcagccgatgaaacagccaagatcatgctggacggccttctggctgacctggatatcagggaaggcgagaaaatcatgctgattctcaacggaaccggcgccaccacactgatggagctgttcatcatttaccgcaggtgcgtatcctacctgaaggagaagaacattgagattgtggccaattatgtgggcgagcttctcaccgtacaggagcaggccggcttccagatgttcatggcaaggatggacgatgagcttctgcactactggaatgcaccgtgcaatacgccgtatatgaagaaataa

SEQ ID NO: 2881 - DNA, 690 bp, Clostridium clostridioforme
atgagcaagattctaatcgtggaagatgaggagagcatagcagagttagagaaggattatctggagctgtccggctttgaggtagagattgaaaatgacggaagttccggtctggataaggcgctgaaggaagactatgatcttttgattctggatctgatgctgcccggtacagatggatttgagatatgtaagagagtacgggaagtaaagaacacgcccatcattatggtttcggccaaaaaagaggatattgacaaaatccgcggtctgggactgggagcagacgattatatcaccaagccattcagcccaagcgagatggtggccagggtgaaggcgcacatggccaggtatgagcgccttattggcagcgggcagccggccaatgagctgattgaaatccgcggcctgaaaatagataagacagcccggcgcgtgtgggtcaacggggaggagaaaacctttaccacaaaggaatttgaccttctgaccttccttgcccagaacccgaaccatgtgtttaccaaagaggagctgttcagcaagatatgggatatggagtccattggggacattgccactgtaacggtgcatattaagaagattcgcgagaagatagagtttaacacggccaaaccgcagtatattgagacgatatggggggttgggtaccggtttaaggtgtga

SEQ ID NO: 2882 - DNA, 1419 bp, Clostridium clostridioforme
atgataaaagataaccagaaaaggctgaaccgcatgcatgtcctgctggatatactggtcactgtggtggcctatgctctggcatggttcattgtcatcagcggaaaggtactgcccttagacgaaggcgtgctaaagccccaggtatattttatggcgcttatttttatcgtgcccatatacctgattctatatgccagtttccatctgtacgtgcccaaacggattcagggacggcgttcggaactggccaatatctgcaaggccaatgtcatcggccttatgctctttacgttcgtactttttggcctgcgaaggttcgtaagccatctgagctatttctccacaaagatgattctggcattctttgcggccaatatcatcctgctggaagcagagcggatatcaatacgcatcttcctgcgctccctgcggaccaacggctataatcagaagcatgtgctcctcattggctacagccgggcggccgaagggttcatcgacagggtcagcgtcaatccggaatggggttaccatgtccagggaatcctggatgaccaccggccggccggctttgcatataaaaaggtacaggtactgggacccaccaatcatctggaggatttcctggcatccaatacgctggacgaaatagccattaccctgagcatcaaagagtactctaatctggaacagattgtggctgcctgcgagaaatcaggcgtgcatacaaagttcataccggattataataacataataccgacgattccctatatggaagaccttcagggacttccggtaatccacatccgccatgtgccccttaccggggtgtttaacgccaccatgaaacggatagtggatttagccggcgctctgtttggtctgattgtattttcgcctctcatgctggttacggctctgctcatcaaaatcacttcaccagggcccgtgcttttcagccaggagaggatagggctgcacaaccgtccctttaagatgtacaagttccgttccatggaggttcaggacccgggcagggagcgcagccagtggacaacgccccatgatcccagggtaacgcctgtgggacgtttcatacgcaagacaagcattgacgagatgccccagttttttaatgtcctcattggtgatatgagtctggtggggccccggccggagcggccgctgtttgtggaaaaatttaaagaagagataccgcggtatatgattaagcatcaggtgcgtccgggactcacgggctgggcccaggtcaatggctaccggggggatacatcaattaccaagaggattgagcatgacctttattacattgagaactggagtctgggttttgacttcaagattatgtttctcactgttttcaagggatttattaataaaaatgcatattga

SEQ ID NO: 2883 - DNA, 381 bp, Clostridium clostridioforme
gggctggacaattttacaaaattattgtattatgtcattacgcagttagttataactaaccaaatagacaccacaaaaggaggattttacatgagcgttgtcattatcggaggccatgaccgcatggtaagccaatataaaaagatttgcaggaattacaagtgtaaggcaaaagtatttacccaaatgagcgccagcctggataaacagattggcagtcctgacctgctggtcctgtttaccaacactgtgtcccacaaaatgatacgctgcgccctggacgaggtgggaagcggcacggagattgtccgctgccataccagcagcggcacagccctcacagaaatcctggaagaaaaatgcgcggtctgtgccgtatag

SEQ ID NO: 2884 - DNA, 1512 bp, Clostridium clostridioforme
atagaagaacaggcaggtgagattatgagtgaaacagttctgcttcaaatgaagaacatccacaaatcatttccgggagtcaaggcgcttcatggggtggacctggagctgagggccggcgaggtccacgcattgctcggtgaaaacggggcaggcaaatccacgctgattaaggttctgggcggcatctacattgcagaagagggcgagatttttattgacggaaaaaaggtaaccattgacggggtaaatgcatctcacagcaacggaatttccattatccatcaggaattggtactggtgcctcacatgactgtggcggaaaatatctttcttggcagggagccgtcaaaggggctttgggtcagccatgagaccatggaaaaggaagcccagcagcttctggacacatatcacatgagcattgacgcggggacgctggtcaaggaccttaccattgcccagcagcagatggtggaaatcgtcaaggctatttcctatcattccaggattctcgtgatggacgagcccacttcatccatatccgacaaggaagtggaatttttgttcagcaccatgcgggagctcacaaaaaagggcgtgggaatcatatatatatcccataagatggacgagctggagcagatctgcgaccgggtaaccgtgctgagagacggaacctatgtgggaaccgagagggtaaaggatactacaagggaccatctcattgccatgatggtgggccgggagctgaccaagtattacaccagggattacatggagcccggcagggttgttttaaaatgtgaaaacattgcagacggaaagatggtcaaaggggccagctttgaactgcgtgaaggggaaatcattggttttgcggggctggtaggcgccggaagaagcgagaccatgaagtgtatcttcggactgacgcccggctgcacgggcgatatcagtgtggaaggaaagaaggcggctattaaatcgcccattgatgccatgaagttcggtattgccctggtgcctgaggaccggaagcaggagggactgtataaggttcagagcgtccggttcaactccaccatcgaggtgctgaaaagctttataaagggcatatgggtggatgcagacaaggaggaggagattaccaggcagtatatcgagatgatggataccaagactccctcccaggaacagcttatcgggaatctgtccggcggcaaccagcagaaggtaatgattggaagatggctggccacagcccctaagatactgattctggacgagcccaccagaggcgtggacgtgggcgccaaatctgagatatacgcaattatgaatgagctggtgaagaaaggcgtgtccatcatcatgatatcgtcagaactgcctgaaattctcaacatgagcgaccgggtctatgtcatgtgtgacggccggataaccgggtgcttcagccatgaggaatgcgtcacccaggaacaaatcatgaagctggcggcaaagtaa

SEQ ID NO: 2885 - DNA, 684 bp, Clostridium clostridioforme
atgcccgccgctttttttatagggcgaagcccattcaaagctcatcctgcccaaaacaaaaccaaccaaaggaaaggggcggtgctaatggataaggtcataacagtaagccgcgaattcggaagcggaggccgtgagctgggggtaaagctggcagaaaagctggacatcccattttacgacaaggagttaatctccatggctgcggacgatatcaatattgcagaagaggcatttcaaaactacgatgagcatatcgtaattcacgacccgttagacaggcagtattaccatgctttttctgacatttacaaagttcccatgtcggaccagattttcgtggcccagtccaacgtcatccgcaggctggctgctcacggtccatgtgttattgtgggacggtgtgcggacatgattctggatgacagcattaacctgttcatctactccaaaatgagggaccggattaagcgtatgcttatactggagccaggttctgacgagaaggagatggagcgccgtatccgagaggtggaccggaaacgcaaggagtattaccagtattacaccggcaacacatggggccgggcccagaactaccacttatgcctggacagcgggctgacaggggtggacggatgtctgcgggcggttctggcttatctgggagaattgtcagagtaa

SEQ ID NO: 2886 - DNA, 528 bp, Clostridium clostridioforme
tgtgtaccgccgtatttagggaaaatgaaacacggaaaggaaagacagatggcaggagaggcatccaggaataaagtgaatataggggcgtcgtccctgattcttattttcatcgttctgtgcatggcaacctttggactgctgtccttaagcagcgcccagggcgatttaaagctggccgggcgcaatggggaggcggtccaggcttattatgaggcggacagcagggggcagcagtggcttaaggaagtggaccaggtcctgacagaggaaatgggggagggaaaggattccacccagtgcagcctggatatcaaggacaggctgggagagctttacaacagggaaaccggccttatttccacggacatccctatggacaggggacagtctctgcgcattgagctggttctcatgtgcggggaaaagcattacgatataaagtcatggtatgtatatgccagtgatgagtatgaaatagataattctatgcctgtgtggggcggagcagccccgtcccaggaataa

SEQ ID NO: 2887 - DNA, 1209 bp, Clostridium clostridioforme
atggatcagaagattctatgggcggtcaatcatatgcctaagacagatgacaagaacctgccgattatgggactggaggagattgcaaaggcaaggacattccacgaaagcttcccccagtacaccaaaacaccactcaccaagctggaccacatggcagcttacctgggagtaaaggaaatctacttaaaagatgagtcctaccgttttggcctcaacgcattcaaggttctgggcggttccttctccatggcccgctacattgccaaggaaacaggcagggacgtatccgaacttccctactcagtcctcacttctgaccagttaagagaagaattcggccaggctaccttcttcaccgccacagacggcaaccacggacgcggcgttgcttgggcagccaaccgtctgggacagaaggcagtggtacatatgcctaagggttccacccagacacgtctggaaaacatcgccaaggaaggcgctcaggtagacatccaggagatgaactacgatgactgcgtacgtctggcagccaaggaagccgacgaaacgccaagaggcgtcatggtacaggatacggcctgggacggatacgaggaaattccatcctggattatgcagggttacggaaccatggccatggaggccggggagcagttaaaggaatacggctgcgaacgtcccacccacatctttgtccaggcaggcgttggttcactggcaggcgctgtggtaggctacttctccaatctctatgctgataatcctcctgctttcgtagttgtggaagccgaggcagccgcctgcctgtacaagggcgctgctgcgggcgacggacaaatccgcatcgtggacggcgacatggaaaccattatggccggccttgcctgcggcgagcccaacaccatttcatgggatatcttaaagaatcatgtgaaagtattcatcgctgctcctgactgggtagccgcaaacggtatgcgtatgctgggcgctcctatcaagggcgacgcgcctgttacctccggagaatccggcgcagctccattcggcgcgctggcagccatcatgtccatggatgaatatgctgacctgaggaaggacattggcctggatgagaattccagagtactgctcttctccactgaaggcgacactgaccctgaccgttacaagaacattgtatggaaaggtctggataaataa

SEQ ID NO: 2888 - DNA, 1623 bp, Clostridium clostridioforme
atggcaaagcagattaagtatggcgtagaagcccgcaaggcgctggaagcaggcgttaaccagttggcagatacagtgcgtgttacacttggaccgaagggacgcaacgttgtcctggataagtcctttggcgctccgttaattacaaacgacggcgttaccattgcaaaggaaatcgagctgcaggatccatatgagaacatgggtgcgcagctgatcaaggaagttgcttccaagaccaacgatgtggccggcgacggcaccaccacagcaactgttctggctcaggccatggtaaacgaaggcatgaagaacctggcagccggcgcaaacccaatcgtcctgagaaagggcatgaagaaggctacagacgcggctgtggaagctatcaagaagatgagcaagccaatcaacggcaaggatcagatcgcaagggtagcagccatctctgcttccgacgatgaagtaggaaccatggtagcggacgctatggagaaggtttccaaggacggcgtcatcaccattgaagaatccaagacaatgaagacagagcttgacctggttgaaggtatgcagttcgacagaggttacctgtccgcttatatgtgcacggatatggataagatggaagctaacttagacgatccatacgtgctgatcaccgataagaagatctccaacatccaggatctgcttcctctgctggagcaggtagttaagatgggcgcaagacttctcatcatcgctgaggatgtggaaggcgaagcactgaccaccctgattgtaaacaagctgagaggcacattcaacgtagtggctgtaaaggctcccggctacggcgacagaaggaaagagatgctgcaggatatcgctatcctgacaggcggtactgttatttccgaggaactgggtctggatttgaaggatgcaaccatggagcagctgggacgtgcaaaatccgttaaggttcagaaagagaacaccatcatcgttgacggcatgggcgacaaggatgccatttccgcaagggtatcccagattcgcaagcagattgaggaaaccacctctgactttgacagggagaagctgcaggagcgtctggctaagctggcaggcggcgtagccgttatccgtgttggagctgcaaccgagacagagatgaaggaagctaagcttcgtatggaagatgctttgaacgctacaagagcggctgttgaggaaggcatcatcgcaggcggcggttctgcttatgtacacgcagctgaggaagtaaagggcgttgttgacggactggaaggcgatgagaagactggcgccagaatcatcttaaaggcactggaagctcctctgttccacatcgtagccaacgcaggactggaaggctccgttattgtaaataaggtaaaagaatcctctgtaggccacggctttgacgcttacaaggaagagtatgtggatatgattgaagcaggcatcctggatcccgtaaaggttacaagaagcgcacttcagaacgctaccagcgttgcttccacactgctgacaaccgagacagttgttgccaacatcaaggagccggctccagcaggcccggcagcacctgatatgggcggaatgtattaa

SEQ ID NO: 2889 - DNA, 663 bp, Clostridium clostridioforme
ggaatgaccaatatccccaaagcggacgaccaggttgaccaatggcgttcagtgatgtttctctatgattcagcactaaaaaaggtcaatacaaagattgaaatattaaataacgagtttgccaaccgttatgattataaccccatcgagcatatcaaatccagactgaagtcagctgaaagcattgtcatgaagcttaagaaggacggatatgaggtgaccattgagaatatgatggaatgcctcagcgatatcgccggtatcaggattatatgttcgttcacgtcggatatctaccagatagccgacatgatagcggctcagggggatgtgactgtccttcatgtaaaggattatatcaagaaccccaagcccaacggatacaagagttatcatatggtagtaactgtgccggtctatctcacggatggaccggtggagaccaaggtggagattcagatacgttccgttgccatggatttctgggccagcctggaacataagattgcgtataagttcgagggaaatgccccggagaacctgctgaaggaactaaaggcctgcgccgatatggtggatatgctggatgccaagatgttttcgcttaacgaggccatcacggcatttgccagggagcagaaggaaaggtcggaagaatcttaa

SEQ ID NO: 2890 - DNA, 1011 bp, Clostridium clostridioforme
atgccaaagatttattatcaggaagattgtaatttgtcattactggagggcaagaccattgctgtgatcggttacggcagccagggacatgcacatgctttaaacttaaaggagtcaggatgcaacgtaattgtaggcctgtatgagggcagccgttcctggaagaaagcagaggagcagggattcgaggtatatacagcagctgaggcatccaaaaaagcagatgtcatcatgattctgatcaacgatgagaagcaggccgccatgtataaggagtccatcgcgccaaacctgcgtccgggtgtgatgctgatgtttgcccatggtttcgccatccacttcggacagattgttccgcctaaggatgtggacgttaccatgatcgctcccaaggcgccgggccataccgtgagaagcgagtatcagaggggcagaggaaccccgtgtctggtagctgtttaccaggatgccacaggtaaggccatggacatggcgctggcttacggacagggaatcggaggcgcaagggcaggtatcctggagaccaccttcagagtggagaccgagaccgacctgttcggcgagcaggcagtgctctgcggcggcgtgtgcgccctgatgaaggccggatttgagactctggttgaagcaggctatgctcctgagaatgcatactttgagtgcgtgcatgagatgaagctgattgtggacctgatttacgagagcggttttgcaggcatgcgttattccatttccaatacagctgagtacggcgattatatcaccggaccaaagattgtgaccgacgagacaaagaaggccatgaagaagattctgtccgatatccaggacggttcctttgcaaaagagtggcttctggagaaccaggttggctgcccgcatttcaatgccatgaggaagaacgaggcagagcagccgcttgagaaggtgggagctgagctgagaaagctttacagctggaatgatacggacaaactgattaacaactaa

SEQ ID NO: 2891 - DNA, 432 bp, Clostridium clostridioforme
agagaaggagatgcgatgaaagctctaaagtatagccgtcagagggaatccatcaaagcctgtctgatgaatcgtcacgaccatcctacggcagacgccctatacgccagcatccgtgaagaatttcccaatatcagtctgggaacggtttaccgtaacctgaatctgctggtgatgaccggcgagatacgaaagctgacctgcggggacggtgctgttcactttgatggagatacccgtcagcattaccattttgtgtgcagcgagtgtaatcaggtttacgacatggaattaggcgccatggaggacctgaataaggaagcccaggaacatgcgccgggcatcatcgacagccactacgtactgttctacgggcggtgcaacagctgtttacaaaaaaaagttgataaagctattgacaaaccagcctaa

SEQ ID NO: 2892 - DNA, 450 bp, Clostridium clostridioforme
tgtgttaaccgcagcggaaggaggattttcagaatgacagatgacaattgtattttttgtaaaatagcgggcggggtgattccgtcagccactctgtatgaggatgaggattttcgcgtgattctggatttgggaccggcgtccagaggacatgctcttatccttccaaaacagcattttgcagatgtatgcgcactggatggggatatagccgccaaagtccttcctctgggtgccaagattggttctgcgatgaagaaatctctcggatgcgcgggattcaatctggttcagaataatggagaggcagccgggcagactgtgttccatttccacatgcatgtgattccaagatatgagggaggtccggccatggtcagttggactccgggaaaggcttcgccggaggaattggcagaggttgcggataaaatcaaaggctgtctgtaa

SEQ ID NO: 2893 - DNA, 699 bp, Clostridium clostridioforme
gcgaatatggaggaatggctgcctcttgtgaaaaaatctccgctattttacggcattaatgatgacgagctctatactctgttaaaatgctgtgcctcggagcaggtgctttatgaggacggggaatacatcttccgcatgggagaatccgtcaatacggtgctggttctgctgaggggaaaggcatgtgtcatccaggagaatttctggggacatcaggaacacatatatcatataaaggaaggggagctctttggccaatcctattcctgcgccaggaccccggtgctgccggtgagcgtggtggcagagggaggatgcgaggccctgttcctcaattaccagcgtatgattacattttgtcccctggcctgtgatttccataccagattcatacacaacatgctgcgtctggtgtcggagcataatgtgaagctggaaaataagctggagcatgtgtgccgcaggaccaccagggaaaagcttttatcctatctgtcagagcaggccatggcaaaagggggaagagattttgacataccccataaccgccaggagctggctgagtatctctgtgtggaccggagcgccatgtccagcgagctgagtaagatgcgggctgaggggatactggattttcagaagaaccactttgtgcttcatgacagagatacgggggagcgcggggaaggggcttaa

SEQ ID NO: 2894 - DNA, 558 bp, Clostridium clostridioforme
cccgcctgcaggacggcgcaggatacgggagcggaattaatccgccaaggagaagtgagtatgaccatttcaattgaatacgaagcagaaaaggtactggatttgccctaccgggaaatcatcgaggacactgtgctggctgccctggattatgagggctgcccctatgaggcagaggtcaatgtcattcttacggacaatgacgccatacaggaaattaaccgggagcaccgtcagattgacgctcccacggacgtgctgtcctttcctatggtggattatgagtcgccatcggattttgaccatgtggaggaggctgtggaggattacttcaatcctgaaaccggagagctgatgctgggggatattgtgatttccgtggataaggtggaggaacaggctgagaaatacggccattcccagaccagggagctggccttcctgacagcccacagcatgctccacctgtttggttacgaccatatggaggacggcgagcggctggtgatggaagaaaagcagaaagagatactggaaaccagggggtatacaagatga

SEQ ID NO: 2895 - DNA, 1227 bp, Clostridium clostridioforme
ggccaggctgcagggacctttgaccagacggccgcagcttccgtgcagaagccggagatagcttcggagggagccgtgctcatggatgctgccacgggaaccgtcctgttttccaagaacggggacaaacagttctatccggcaagtatcaccaagctgatgacagccctgctggtggcggagaactgcagtctggatgacaaggtcacattttcagcaacagctaccacgaacctggaagcgggcgctgtatccatcaatatgacggcaggggatgtgatgagtgtgcgccagtgtctttatgccctgcttctcaaatcagccaatgaagtgggaaatgcccttgcggaacatgtggctggcagcaatgccaaatttgcggagatgatgaacgccaaggcagcggccctggggtgtaccaatacacattttacaaatcctcacggcctcaatgactccaatcattacaccacaccccatgatatggctctgattgcaagggcggcgtttcagaatgatgtggtgaagacggtggcgtccacgcgcacgtatacgctgcctgctaccataaagaatccttccgggcttaccgtgaccattggacacaagatgctgaaccccaacgatgccaggtattatccgggcgttatcggaggaaagaccggttatacgtccaaagcgggaaataccctggtgacagcagtggagaaggacggagtcagattgattgccgtcattatgaaaagcaaatcgactcattatacggatacgaaggcattgttcgattacggatatgaactggtgaaggcaggtgctttaagcggcagcgctggcagtacaggcagttcagataacgcaggcacgacaggcagttcttccggcatgggaaatgccggtccgggaacatcctcagccaagggctgggtacaggacagcaatggatggtactatgtgaaggataacggggccaaggctgccaatgagtgggttacggcagacggtgtttcctactggattgattccaatacatatatggccaagggatggcgccaggtaaacggcaaatggtatttcctgcgctccaacggagccatggccaggaaccagtgggaaaaggtggaagaaaacggccagtggttttatctgggcgcggacggcgccatgctgaccaacacaaccacgccggatggctcgcgggtggatgagagcggggcatgggtgcagtaa

SEQ ID NO: 2896 - DNA, 1371 bp, Clostridium clostridioforme
atgatcgaaaaaatcaaagagaactgggacaaaatcttacttactttaaaagaagaacacgaaatatccaatatctcctacagtacctggctggaacccttaaagccgcactcttttaaagacaacacagtaaccatcattgttcccgaacagacctttttacaatatgtaaataaaaaatatggatttttattaaaggtaaccatctcggaattccttgaaaaggaatgcgaggtggatttcaaagttaaggagcaaatcgtggagacggaggaaccgtctgcgccccagctgattaagaataacaaggtttctgtcagccccgatgtcatacagagtgccaacttaaatcccaagtatacctttgatacctttgttgtaggcggaaataacaacctggcccatgctgctgccctggccgtggctgaatccccgggtgagatatacaaccctctctttatatatggaggcgtgggacttggcaaaacccatctgatgcatgccatcgcccacttcatattaaagaacaacgcgaaatccaagatactgtacgtcacctcagaaacctttaccaacgagctgattgacgccatccgtaataaaaacaacataaccaccacggaattcagggaaaaatacagaaacaacgatgtccttctcatcgacgatatccagttcatcataggtaaggaaagcacccaggaggagttcttccatacctttaacacattatatgaatcaaagaagcagattataatatcctcagataaaccgccaaaagaaattgagacactggaggaacgtctccgatcccgttttgaatggggcctgaccgtggacatccagtcccctgattatgagacaagaatggcgattctgcgcaaaaaggaggagatggaaggatataatatagataacgaggtaattaaatacatcgctaccaatatcaaatccaatatccgtgagctggagggagccctgacaaaaatcgtcgcgttatcaaggcttaacaaatgcgacattacactggaactggccgaggaagccttaaaggacatcatttcccccaatgcccagagggaagtgacaccggacctgattattcaggtggtttccgatcattttggccttacccccctggatatctcatcccagaaacgtaataaggaaatcgtatacccaaggcagatcgtcatgtacctgtgcagggatatgacggccactcctctccagactatcggacggtacctgggaggaagggaccataccaccattatacatggcgccgagaagataaccggtgacatggcaaaggacgacacattgagaaataccatagagatactgaaaaagaagatcaatccacaatag

SEQ ID NO: 2897 - DNA, 483 bp, Clostridium clostridioforme
atgaaaaaaatttctgctgttattttaaagacagaggagcttctggccggtgcaatgttatgcatgattgccgttctggtgttctggtccgcagtggccagaaccatcggaatgccggtgaactgggcccaggatgtttcgctgctggcatttggatggctgacctttatcggctctgatatcatcatcaagagcggcggcctgattcgaatcgacatgctgtccaaccggttccccagggcggtccagaagactctgatgctggtgtttgactttttcatgctgctgtttttattgattctgattgtttacggattcctgctggtgtcccagagctggaaccgtacctttaataccctgaagatgagctatgcctggtgtaccctggcggtaccggtgggctccctgctgatgtttttcagcatgattggcaagatgctcggtgatatcaggaaaccaatgaaagaatggggggttaattaa

SEQ ID NO: 2898 - DNA, 804 bp, Clostridium clostridioforme
atgaatccggagacacccgagcaaggtttccgggttgctaaggcatttacccgttatatgaacgtgggagggagattccccgtcaataccactaggaggttatttagaatgaaatcaggaaaaagatatgcagaggctatgaaaaacgtagaccgtgctgcactttatgacattgctgatgctatcacattagtgaagaagaatgcatccgcaaaatttgatgagactgtagagcttcatatcagaacaggatgtgacggacgtcatgctgaccagcagattcgtggcgctgttgttcttccacacggaacaggcaagactgtacgtatcttagtatttgcaaagggaccaaaggccgatgaggctcaggcagcgggtgctgattacgtaggagcagaggaactgatcccgaggattcagaacgacggctggctggattttgacgttgtggtagctacccctgatatgatgggcgttgtaggccgtctgggccgtgtactgggccccaagggcttaatgccgaacccaaaggccggaaccgtaaccatggacgtaaccaaggctatcaacgacatcaaagctggtaagattgaatacagactcgacaagacaaatattattcacgtgccagtaggaaaagcttctttcacagaggagcagttagcggacaacttccagacgcttattgatgcgatcatgaaggctaagccaagcaccgttaagggcgcataccttaagagcgttgccctgacctctaccatgggtcccggcgttaagctgaacgttgcaaagcttgtgaactaa

SEQ ID NO: 2899 - DNA, 534 bp, Clostridium clostridioforme
atgggtacctggaattccagaggattaaggggctctacccttgaagatttgattaaccataccaacgatttgtacagggaaaagaagctggctctgatacagaagataccgacgcccatcactcccattgaaattgacaagtccagccgccacatcaccctggcctattttggccagaagagtaccgtggactatatcggggccgtgcaggggattccggtgtgttttgatgccaaggaatgcgcggtaaagacatttccccttcaaaatatccatccccaccagatcgaattcatgggggaatttgagaaacagggcggaattgcatttatcattctctattttaccggcctggacgagatatattacctgccttttgaacagatagagggatactggaaacggatggaggagggagggcgtaaaagctttacctacgacgaggtggacaaaaactggcgggtccgttcccatgccggctttctggtccactatctggaagaaatacaaaaagacctggacagaaggtcttag

SEQ ID NO: 2900 - DNA, 1557 bp, Clostridium clostridioforme
atgaacggttatgcagttttaaagggcgccagctatacattggcggttacacctgatatggttattcacaatggtacaacacagacaacagagatgattgttaatcctgagtcggaatatttgaaggagcttccaagccacctgagaagttttgaggatgccgttaactatatgccgaaccaggtatatattggcaatgaaaagccacagaaaatggctgaagttggatttccatggtatgacaaattaatggatggggccagcaaggacggcaagtacggagagattatgcctgaggatgagttctacggcctgattcagatctgcgacgtatttgacctggttaaactggaaaagggatttgcagctgacattaaggcaaagctggatgcacatcatatgttcacagacgagcatgtagcaatccttgataagaacagtgagacaacacaggaagaaatcgctgctctggtaaatgacgagcacgcagagccgctgtacttcaacaatgcactggttggcgctgttaagagagctcatgacgtggatgttaatttatccgcacacgttatgttggagaacctggtaacaaaggcttctaacgtattatccttacttaacttggtaaaaaaagcaggagttaatcccgctgacatagattatgttgttgactgctgcgaggaagcctgcggcgatatgaaccagagaggcggcggcaactttgcaaaggcagccgctgaggttgccggatttgttaatgcaaccggttctgacgtaagaggtttctgcgcagggccagctcatgcaatgcttcatgcagctgccctggtaaaggcaggaacattcaagaacgttgtggttacagcaggcggctgtaccgctaaattaggtatgaacggcaaggatcatgtgaagaagggacttccgattctggaagacgctatcgcaggattctccgtattagtaagtgctgacgacggcgtaaacccacagatcagaactgatatcgtaggacgccatacagttggaacaggatccgctcctcagaacgttatttcttccctggtaactaatcctctggatgaggctggtttaaagattgtggatatcgacaagtactctcctgagatgcagaatccggacatcacaaagccggcaggcgcaggcgatgttcctgaggctaactacaagatgattgctgcccttggcgttaagaggggcgaattacagcgcaatgagattgcggatttcgttaaggagcatggtatgaccggctgggctccaacccagggacatattccttcaggcgttccttaccttggacttctgagagacgaaattctggcaggcgagacaaagcgcgccatgattatcggtaagggaagcttattccttggaagaatgaccaatctgttcgacggcgtatccttcgtggttcaggccaacgatggttctgcttcaaaggagagcggcggtgtagatgagagcaaggtaaaggctatgattggccaggccatgagagcgtttgcccagggtctgatgggcgaagaggaataa

SEQ ID NO: 2901 - DNA, 1395 bp, Faecalibacterium prausnitzii 1 (SL3/3 - M21/2)
atgccccgggaaaaggggctgccaaaggagaaaggacttgttatgaagatcattctggtgggcggcggcaaggtcggcacggctctggcacgtcagctcagcgaggaaggccacaacgtgactgtggtggacaccaacaaagcgcgcgtggagcacctgaccgaaagctacgacgtgctgggcattgtaggcaatggctcgtccatcaccaccctgtctgaggcgggcattgaggatgcggacgtgttcattgcggtcaccggctcggacgaactgaacctgctttgctgcatgtttgccaaaaaggcgggccactgccacggcattgcccgcgtgcgcaacccatcctacagccacgagctggactttatcaaaaagcagatcggcatttccgccattatcaacccggaaatggcagcggcaaaggagatctctcatctgctgcggttccccggtgccagcaagatcgatacctttgcggacggccgtgtgcggctgatcaagtttgcgctgcccgatgcactggatggcgtggccatccgcgagatccctacccggctcaagagcgatattctggtgtgcgcggtggagcgtgagggcggggtcatcatccccaacggtaactttgtgctgcaaaagggcgatcaggtcactttccttgctacgcaggaaaaagctcacgccttcttccagcagctgcatctgccggtgcagccggtacgcaacgccctcatcgtgggcggcggtgccattgcctactacctcagtcaggaactgctggaaaaccacgtgcgggtgcgtatcgtggagcgggacgcagcccgctgcgtagaactggccgagcagctgcccggcgcacagatcctgaacgaggacggctccaaccgcgagtttctgctttccgagggtctggaatccaccgaggctttcgtggcactgaccaacatcgacgaggagaatgtgctgctgaccctgtttgccaaaaagcactccaacggcaagctggtgaccaaggtcaaccgtctggaatttgacgatattctggccgggctggatctgggcagcgtggtctaccccaagtacatgacctgtgactacatcgtgcagtacgtccgcgccctgcaaaacgaggcgggcaacaacatcaagactctgtaccgcatactggacgaccgcgtggaggcgctggagtttacagtgcacgaggagagcgccgctaccggtgtgcccctgagccagctgcacctgaaaaagaacctgctgctgtgctgcattacccgcggcagcaagattttgatcccccgcggcggcgaccagatccaggtgggcgacaacgtcatcgtggtcacgctggagcatggtctgcacgatctgcgcgatatcgtggagcactga

SEQ ID NO: 2902 - DNA, 1359 bp, Faecalibacterium prausnitzii 1 (SL3/3 - M21/2)
atggatcatttgcagaatgtattaagctacttcgaccagcagcagcccctttgcgcagagcatgaccgcatccccaaggacctctatcgggagttcggggtcaaggccggcttgcgcgatgagactggcaagggcgtgctggcaggtctgaccaacatctcggacatccgggcgttccagtatgtggacggggtcaagcacccggcagacggtcagctgctgtaccgcggctatgacgtaaaagacctcatcaacggcagccgcggcaaccgctttgcctttgaggaggcgggatatctgctgctgtttggtcagctgcccaccccggagcagctggaacagttctgcgcggtgctgggcgagtgccgcaccatgcccaccaactttacccgcgatgtcattatgaaggcacccagccacgatatcatgaacagcatggcgcgcagcgtgctgacgctggcttcctacgaccccaaggcggcagatttggacaccgccaacgtgctgcgccagagcatccagctggcgggcatcttccccatgctggcggtatacagctaccacgcctataatcactacgaaaaagacgccagtatgtatatccaccgcccggatcccagcctttccaccgcagaaaattttttgcggatgctgcggccggatatgcagtacaccccgctggaagcccgcgtactggacgtggcgctgctgctgcacgccgagcacggcggcggcaacaactccacctttaccacccgcgtggtcacctcctccggcaccgacacctactcggccatggcggcggcgctgtgctccctcaagggcccgcgccacggcggtgcaaacctgatggtcatgcacatgatgcagaacatccgggacaacctccacgaccttgaggacgacgaggagctggaagcctacctgaaaaagctgctccacggtgaggcctttgaccgcaagggtctgatctatggtatgggtcacgccgtctactccctcagcgacccgcgcgaggtggtgttcaagggctatgtggagcagcttgcccacgaaaagggccgggacaaggatctttccctctacacccgtatcgagcgcatggcaccccagctgatcgcgcaggagcgcaagatcttcaagggcgtcagccccaacgtggacttttacagcggttttgtgtacgagatgctgggcatccccatggagctgtacacccctctgtttgccgtggcgcgcgtcatgggctggagcgcccaccgcatcgaggagctgctcagcgccaacaagatcatccgcccggcctacaagagccttggcggcacccacgattatatcccgcgcagccagcgggcataa

SEQ ID NO: 2903 - DNA, 3279 bp, Faecalibacterium prausnitzii 1 (SL3/3 - M21/2)
gtggtgagtactgtgcagaaaagttaccgcaaaaatatcctgcgcgagatgaaaagcagcatcagccgggtggtgtccctgtttggcatcgtggcgctgggggtgatgatgcttaccggcctgatgtgcattgcccccgatatgcgcactgcggcccagaagtactatgtgcagcagaatgtgttcgacctgcgggtgctgtccacccttggcctcagccagagcgatatcaacgccattgccgctgtggacggggtagatgccgtgcaggcggtaaagtatcaggacgtggaaggacactggacaggggacgagcagaccacggtggcgcggctgtatcagctgcctgccgacccgcaggccgatacgccggagaacatgaaccgcttggtgctgctgtccggccggatgccggaagctgccggggagtgcgtggtgcacgtgatgggccacggcggcccggtggagctgggcacccagttgaccctgccggaagagaccgagggggtcagcgggcaggtgttcacggtggtgggcacggtgcaggacccgctgcatttttcctccgattccgagagcagcaccgtgggcgatggccagctggactgcatcctgtttgtgccggagggcactttgaccgcagattattatacggtgtgctatatcaaggcaaaaaacgccggattgtatgataattattccgatgaatatcaggccgcagtggatgccgtagcggaaaagctcaaggccatccagagcgtgcagtgcaccgcccggcgggaagagctgatggacaccgccaacgacaagctgaccgaagcgcgcacggagtacgacagccagaaggccgaagcggagcgtcaatttgccgaggcggaggcaaagctggcagacgcacagcagcagctggatgccgccaaggcgcagctggaagccggggaaaaggagcttgccgcccagaagactgccctgccggacaccatgcagagcggtgccgacaagctggtgagcagcgaggagcaggtgctggaatttgaggaacagttacagcaaatcgagatgctggtcaacctgaaaaaggtggcagaccccctgctgacctacgcggaaaccgccctgcgcaacgccgaaaaggcgctggacgaagccgagccggaggacgaagactacattgagctgcgggatgcactggccaaggcgcaggccgcttacgacaacatctataaccagctgcagggctatcagcagcagctggacgcgggcaagcggcagatgtacaagcaggggcttatctcctcgccgaacctctccaacgaccagctggtgaccgaggccaaggctgcgctgcgcaagatgaaattgcagcttttgcaggggcagttgcagctgaccaccggcaccgccagcgcctacacccagttcgatgccgcacaaaagcagctggaagagggctgggcagagtataatgccggacagacccagctggaagaatcccgcaccgagtacgagagccggaaagccgaggcagagcagaagctggcggacggccttgcccagctgaacgatgccgaggagcaggtgaaccagatcaaaaagggcgagtggtatgtgctggaccgcacctccaccatgagctgcgtcacctttgcccagtacgccgaccgcatggacgccattgcccgggtgttcccggtgttcttcttccttgtggcggcgctggtggctaccaccaccatgacccgcatggtggacgagaaccgcctgcagatgggcaccttaaaggcgctgggctactccaatttcagcatcgcgggcaagtatttgttctacgcgatgctggccaccattctgggcagcatcgtcggcatggtggtgggctttgtggtgttccccatcattatctggaacgcctatcagctggtgttcagcctgcccaccttcaccctgtacttctacccgagcatggcagctgccagtgtgggcatcagcgccgccgtcatcggctttgccacatggtacgcctgccgttccagtctggccgaaaagaccgcagctttgctgctgccccgggctcccgtggcgggcaagcgcatcctgatggagcgcatcaccccgctgtggtcccggatgtccttctcccaaaagaccaccgcccgcaacctgttccggtataaaaagcggttcttcatgaccgtgctgggcgtggcgggctgtaccgcgctgctgcttatcggcttcggcatacaggattccctgctgcccatcgtcacaaagcagtctacggagctgacccacaacgatatgtccatcaccctcagcgaccccaaagccctgaccatggagcaggggctggcagaggagctggacagcaacagcgctgtgcagaactggggcgcggtgtataccaaatccaccaccatctacaatgccgaaggcgagagtgcaagcgtgagcatcgtggctgcggcaaaggacagcgacctgacccgctatgttaccttccgcacccgcaaggggcacaaggccatcagctttgacagcggcagcgccatcctgaccgaaaagaccgccgagaacttgggcctgcacaccggcgataccttctgggtggagaacaccgagggtgcccgggtggagctgaccctgaccggcatcacggaaaactatatgttcacccggctgtacctcccccgcgcacagctggaaagcctgctgggcacggcagagatcccgtggaacacggtctacgggcagaccacctgcaccgatgctgccgggtacaacgccctgcgtaccgacctgctggactgcaactatgtcagcggcatcagctttaccgaggacaccaccgagctgttcgataacctcatcgtcagtctgggctatgtggtggtgctgatcatcatctgtgcggcggctctggcggctgtggtgctgtataacctcatcagcgtcaaccttggagagcgcaaaaaggagctggcgaccatcaaggtgctgggcttttacgatcaggaggtgtaccgctacatcttccgcgagatcgagctgctggcgctcatcggctccggcgtgggtctggcgctgggtgtgccgctgcacaagttcattgtgttgaccgtggagatggatcagctcatgttcatccgcaccatcgccctccgcagctacctgctggcggtggcgctgaccatggtgtttaccgtggtggtctgctttgtcatgcggcggcacgtccgacgcatcagcatggtggaaagcatgaaggctccggagtaa

SEQ ID NO: 2904 - DNA, 2112 bp, Faecalibacterium prausnitzii 1 (SL3/3 - M21/2)
ttgaagcaacaactgattgtggttatgcgcacggaagacggaagggagaaaacgatggcagaggaaaaatttgaactggtgtcgaactatgcccccaccggtgaccagcctcaggcgatcgcgcagctggtggagggggtgcagcggggtgaccgctgccagaccctgctgggcgtgaccggcagcggcaaaacctttaccatggccaacgtcattgcccagtgcaaccgccccacgctggtgctggcgcacaacaaaacgctggcggcacagctgtgtaccgagttccgctcgtttttccccaacaatgcggtggagtacttcgtcagctactacgactactaccagccggaggcctacattcccagcaccgatacctatattgaaaaggacagcgctatcaacgacgagatcgaccgtctgcgccactcggctacggcggcgctttccgagcggcgggacgtcattattgtggcatcggtatcctgtatctactcgctgggcgaccccatcgactaccgcagcatggtcatcagtctgcgccccgggatgcaaatggagcgggacgagctgtgcaaaaagctggtcaccctgcaatacgagcgaaacgacgtgaattttgtgcgcaataagttccgggtacatggcgacacggtggacatttatctggcttatatgagcgagcttgccatccgggtggagttcttcggggacgagatcgaccgcattaccgagttcaatcccctgaccggctccaagcagaacgtggtcaagcacgttgccatcttcccggccagccactatatcgtcagcgcggaaaaaaaggccgctgcgctggaaaagatccgcgccgagtgcgatgcgcaggtcaaacagttcaccgccgagggcaagctgatcgaagcccagcgcattgcccagcgcactaactacgatatcgagatgctgaacgaggtgggtatctgcaagggcatcgaaaactactcggcagtgctgtccggtcgtgcgccgggcagtatgcccaccaccctgctggattatttcccggaggattttctgctcttcgtggacgagagccacgtcaccttgccgcaggtgcgcgccatgtacggcggcgactacgcccgcaaaaaaacgctggtggaatacggtttccgtttgccgtccgcctttgataaccgccccctgaaatttgaggaggtggagtccaagctcaaccagatgatctttgtctccgccacccccggcgagtacgagcgccggaacagctcacaggtggcgcagcaggtcatccgtcccacgggtcttttagacccggtcatctcggtgcgcccggtggaagggcaggtggtggacctgctgggcgagatcaacgcccgcatccagcggcaggagcgggtgcttgtgaccaccctgaccaaaaagatggccgaggatctcaccgattacctcaccgagcaggggatcaaggtcaagtatatgcaccacgaggtggatacctttgagcggatggagatcatcaaggatctgcgtttgggcagcatcgacgtggtggtgggcatcaacctgctgcgtgaaggtctggatttgccggaggtgagccttgtggccattctggatgccgacaaggagggttttctgcgcagcgagaccagcctgatccagaccatcggccgcgccgcccgcaacgcggagggcatggtcatcatgtacgccgatgtggtgaccgacagcatggagcgcgccatcaccgagaccgagcgccgccgcgccattcagatggcctataatgaggaacacggcatcgtgcccaagaccatcgtcaaggccattgctgacagcatcgagatcagcgataaggccgaaaacgccaagcgcaacacccgccgcatgggcaagatggagcgggaggctgccatcgagcgcctgacccgggagatgaaggaggccgcgaagctgctggaatttgaacacgcagccttcctgcgggatcagatcgaccgcctgcgccgtggcgagaaccccaccgtggactctgccgccgagaccgagcgcaagcagaaccatgcacagacacaacgaaaagggagaaaataccttggcaaacgataa

SEQ ID NO: 2905 - DNA, 1197 bp, Faecalibacterium prausnitzii 1 (SL3/3 - M21/2)
accgcgatgctgctgacaaacgctgtgaacaccgagggacggccgctggagatctatgtaaaggatggcaaaatcgctgccgtagggcaggatctttccgcccttgccgccgagaacgagacggtggtggatgccggtgggctgactgtgctgcccgcatttgtggatctgcactgccattggcgcaccccgggctttgagtacaaggaggacatcgagaccggcagccgcgccgctgccgccggtggttacacctttgtgaacctgatgcccaacaccaagcccgtctgctcctctgccgcacaggccatgatggtggagcagaaggctgccgaggtggggctgtgcgatgcaaaccagaccgtctccatcaccgagaactttgacggcgtgagcatcgaccacctcaagaccctgcccgccagcgtgaagttcatcaccgaggatggccacggcgtgcaggataacgccaccatggcacgggcttttgccatctgcacccagaaggacatcacggtcatgagccacgccgaggatatggagatcagtccgtgggattaccgtctggccgaggatatcgagacggtgcgcaactgctggctgagcgagtactaccagacccggctgcatatgtgccatgtgtccacccggggcgcgctggacgccatccgcatggcaaagctgcggggtgcacccgtcacctgtgaggtgaccccccaccacttgtggttcaacaacgacacctgcgactaccgggtcaacccgcccatccgcaccgccgacgacgtggaggcgctggtggagggcatccgtaccggcatcgtggacgccattgccaccgaccatgcacctcactctgaggaagataagctgaagggcatggccggtatggtgggcagcgagaccgccttcggcgtgtgctacaccaagctctgcaagcaggagggtctgccgctggagctgctggtgcacctgatgagcacacgccccgccgagatcctgggccttgccaagggtcagctggagccgggcttcgatgccgactttgtgctggtggatctggacaccccctacatggtggaaaaggaaaagctgcactccaagagccacaacaccccctttgacggcgcacagctttacggcaaggtgtttgctaccatcaaggccggtaagatcacctatcaggccgaggagtaa

SEQ ID NO: 2906 - DNA, 1422 bp, Faecalibacterium prausnitzii 1 (SL3/3 - M21/2)
atgaataaggatctgacggtgggcaagccgtcacaggtattgtggcaattctgtctgcccatgttcggcagcatcattttccagcagctgtacaacatcgcggatagtctggtagcgggcaagttcattggtgaaaatgcgctggctgcggtgggcaacagctacgagatcaccctgatcttcatcgcctttgcctttggctgcaacatcggctgctcggtcatcgtgtcccgctactttggcgcaaaggaataccgcgagatgaagacctcggtctacacctccctcatcggctctgccgtgctgtgcgccgtgctgatgggcatcggtctgtttggctgcgacgccctgctggagctcatcaacaccccggaggagatccttgcagattctgcgctgtatctggatatctacgttctgggcctgcccttcatgttcttctacaacattgccaccggcatcttctctgcccttggcgacagcaagacccccttctacttccttgcagtctcttctttgtccaacatcggcgtggacatcctgtttgtggcaggtttcaagatgggcatcgccggtgtggcatgggctaccttcctgtgtcagggtgtcagctgcgtgctggccatggtggtggtgttccgccgcatccgcgctttccacaccgagggtcatgtgcagctgttctcgtggaatatgctgggcaaggtggctgtggtggctgtgcccagcatcctgcagcagagctttgtctcggtgggcaacatcatcctgcagagcattatcaacacctttggtgccagcgtcattgcaggctattctgccgccgtcaagctgaacaacatggtcatcacctcctttaccaccctgggcaacggcatctccaactacacctcccagaacatgggtgcaggcaagatggaccgcgtgaaggagggctttggcgcaggccgcaatctggtgtggctgttgtgcgtgccgctggtggtgctgtacttcttctttggccgctttttgctgctgctgttcatgaacgacccgcagggccctgccattgacaccggtatgctgtttttgcgcatcctctctcccttctactttgtggtgtcggtcaagctggtggcagacggcatcctgcgcggctgcggcctgatggtgcggtttatgatcgccaccttcaccgacctgattttgcgcgtgggcattgccgccgtgctcagcgccaccgcgctgggctccaccggcatctggatggcatggcctgtgggctggtgcatcggtacggcgctttccatggtgttctacgtcaccgccatccgcaaggcactggcagagccgttggctgttgccgaggccgagggacaggccgccgaagtccgtgccgaggccgaatttgccgccgacgccgagatggagaccctgtaa

SEQ ID NO: 2907 - DNA, 4548 bp, Faecalibacterium prausnitzii 1 (SL3/3 - M21/2)
atgggaaagactatggaaaactttacagagcagaaaaccacccttggtctgtacgacccacagttcgagcacgatgcctgcggcatcggcgctgtggtggacatcaagggacgtaaaagccaccagacggtggacgatgcactgtccatcgtggagcggctggagcaccgcgccggtaaggacgccgagggcaagaccggcgacggcgtgggcatcctgctgcagatcagccacaagttcttctccaaggttgccgaggagctgaacattcggctgggcaatgagcgggagtacggcgtgggtatgtttttcttcccccagaacgagcacctgcgggcacaggccatgaagttgttcgaggtggtcacccgcaaggaggggctggagtttctggcatggcgcgaagtgcccgtagaccccgatgccgttgggcagaaggcgcgggactgtatgcccgccatctggcagtgcttcatcaaaaagcccgccaaggtaagcaagggcatcgagtttgaccgccgcctgtacatcgtgcgccgcgtgttcgagcaggccagcaacggcacctatgtgcccagcctgtccagccgcactatcgtgtataagggtatgttcctcgtgcacgacctgcgccgcttctacgctgatctgcaggacccggattatgaatccgccatcggcatggtgcacagccgcttttctaccaacaccaaccccagctggatgcgtgcacaccccaaccgctttatcctgcacaacggcgagatcaacaccatcaagggcaacaccgacgccatgctggcgcgtgaggagagcatctccagccccattctgcaggacgatatgaacaagatcctgcccatcatcaacacctccggttcggactccgccatgctggataacactctggagtttatggtgatgaacggtatggatctgccgctggccgtgatgatcaccattcccgagccgtgggagaacaacaagaacatcagccagaaaaagcgggatttctaccagtactacgccaccatgctggagccgtgggacggccccgccgccatcctgttctcggacggcgatgtgatgggcgcggtgctggaccgcaacggtctgcgccccagccgctactacatcaccaaggacggccgcatgatcctgtcctctgaggtgggtgtactggaatgcgacccggagaacattctggtcaaggagcgcctgcgtcccggcaagatgctgctggtggataccgtcaagggcgaggtggtggacgacgaaaagctgaaggagctttacgccagccgcgagccctacggcgagtggatcgaccgcaatctggtgcagctgagcgggctgaagatccccaacgtgaaggtggaaggctacaccggcgagcagctgacccggctgcagaaagtgttcggctacaagtacgaggacgtgaacaccatgatccttgccatggcgcgggcgggcgcagagccctccggtgccatgggcaccgacaccccgcttgccgtgctcagcagccagcatcccccgctgttcaactacttcaagcagcgtttcgcgcaggtgacgaacccgcccattgacgccatccgggaaaaggtagtcacctccaccagcgtttacatcggtgcccacggcaacctgctggaggataagccggagaactgcaaggtgctcaaggtgcacaaccccatcctgaccaacaccgacctgttgaagatcaagtacatgaatgtgccgggcttcaaggtggctacggtatccatcaactactacaagaacaccagtctggaaaaggccatcgaccgggtatttctggaagtggatcgcgcctacaaggagggtgcaaacatcatcatcctgtccgaccgggacgtggatgaataccatgtgaccattcccagcctgctggctgtttcggcagtgtcccagtacctcatccgcaccaaaaagagcaccgcactggcgctgattttggaaagcgccgagccccgggaggtgcaccactttgccaccctgctgggctacggtgcctgcgccatcaacccctatctggcacacgagaccatcgggcagctgatcgacgagggtctgctggacaaggactattacgccgctgtgcaggactacgacaacgccatcctcaacggcatcgtgaagatcgcctccaagatgggcatttccaccatccagagctaccagagcagccagatctttgaggctgtgggcatctcgaaggaggtcattgataaatactttaccggcacggtgagccgcgtgggcggcatcagcatggcagacattcaggccgatgtggaggcgctgcataacgccgcctttgacccgctggggctggatatcaacatggagcttgccgacagcggtgcccacaagttccgcagcggcaaggaagagcacctgttcaacccccagaccatccatctgttccagaaagcctgccgcaccggcgattacgacaccttcaagcagttcacccagacggtggacaacatgggtgccgagggtgtgcatctgcgcagcctgctggacttcaactacgccgcagacggcggcatcccgctggaggaggtagagccggtctccagcatcgtcaagcggttcaagggcgctgccatgagttacggcgcactgagcagcgaagcacacgagaccattgccatcgccctgaaccgtctgggcggccgcagcaataccggtgagggcggcgagcccgaagagcgctaccacagcgagagcaattccaagatcaagcaggtggcctctgcccgctttggcgtgaccagcaaatatctggtcagcgccgaggaaatccagatcaagctggcacagggcgcaaagcccggcgagggcggcaacctgcccggtgccaaggtgtatccgtggatcgccaagacccgccacagcaccaccggcgtgggcctgatctctcccccgccccaccacgatatctactccatcgaggatctggcagagctgatctacgatctgaaaaacgccaaccgcagcgctaacatcaacgtcaagctggtcagcgaagccggtgtgggcaccattgccgccggtgttgccaagggcggcgcacaggtcattctggtgtccggctatgacggcggcaccggtgctgcgccccgcacctccatcaagcacgcaggtctgccttgggagctgggcatcgccgagactcaccagaccctgatcctgaacggtctgcgcacccgcgtgcgcattgagagcgactccaagctgctgtccggccgggatgtggccatcagctgtatgctgggcgcagaggagttcggcttcggcactaccctgctgatggccgagggctgcgtgatgatgcgtgtgtgcaatctggacacctgccccatgggcatctgcacccagaaccccgagctgcgcaagaacttcaagggcaagccggagtacatcatcaactacctcacctttgtggcagaggagctgcgggagtacatggcaaagctgggcgtgcgcaccgtggacgagctggtgggccgcaccgatctgctgcgggtcaagcccgctgccccgggcagccgcgccgcaaagctggatctggactgcatcctgcacaaccccgccattgcaaacagcaacgtccactttatcaaggaggacagctacgacttccatctggaaaacacgctggacatgaaggtgctgatgaagaagttcaagctgggcagcaaggctccccagagcgtcagcctgaatgtttccaacgtggatcgcgcctttggtgccatctttggcagcgagatcacccgtaaatacggcaacgacctgccggacgatgtgtacaccgtgcactgcaacggtgcaggcggccagagctttggtgcctttatccccaatggcctgacgctggagctggtgggtgactgcaacgactacatgggcaagggcctttccggcggcaagatcgtggtgcgcccgccgcagggcatcgacttcaagcccgaggagaacatcatcaccggcaacgtggcgctgtacggcgctaccagcggcaaggcgttcatctccggcgtggccggcgagcgcttctgtgtgcgcaacagcggcgctactgccgttgtggagggcgtgggcgaccacggctgcgagtacatgaccggcggcaccgtggtggtgctgggacagaccggcaagaactttgcagccggtatgaccggcggcattgcctatgtcctggacgaaaactgggacttctaccagcgggtgaacaaggagaccgtcagcctggagccggtggagcacaagtacgatgttgccaccctgaaggagctgatccgcgcccatgtggaggccaccggctctccgcgcggcaaggagattctggacaatttcagtgcgttcctgcccaaattcaaaaaggtgctgccttacgattacgaccgcatgctgcgggtcatcgcctcggtagaggagcgtggtctggacggcgagcaggcacagatcgaagcattttatgcagtgcagaagcataagtaa

SEQ ID NO: 2908 - DNA, 1368 bp, Faecalibacterium prausnitzii 1 (SL3/3 - M21/2)
cttgaattgcggcactgggccgcatgggatagaccgcaggccggaacatgccgggctgcgcaaaacgagagggatgttattatggaaaagaaaccgtttctgaccgaggcgatggcacagcagatcatcgaagatgtgcccacgccgttccacgtctacgacgagaagggcatccgggagaatgtccgccgcatcaacaaggccttcagctggaacaagggcttcaaggagtactttgcggtcaaggcactgccgaaccccgttatcctgcagatcctcaaggaggagggctgcggcgtggactgctcctccctgaccgagctgatgctcagcgaggcctgcggctttaccggccacgagatcatgttctcctccaaccagacccccgtggaggatatgcagaaggcctacgagttgggcgcctacatcaatctggacgacgccaccatggtggagtttctggagcgggtggccggggtgccgcaggagatcttctgccgctataaccccggcggaaccttccagctgggcgagagcgaagagggctttcaggtcatggacaagcccggcgatgccaagtacggtatgaccgagcagcagatgatcgacagctacaaaaagctgatgcagaagggcgcaaagcagttcggcatccatgctttcttggcctccaacaccatctcggacgcctactacccggagctggcaggcatcctgttccagctggctgtccgggtgcagcaggctaccggtgcgcacatcagctacatcaacctgtccggcggcgtgggcatcccgtaccgcccggagcagaccgagaacgacatcatggccatcggcgagggcgtgcgcaaaaagtttgaggagatccttgtgcctgccggtatgggcgatgtggccatcttcagcgagatgggccgctttaccaccggcccctacggtgcactggtgtccaccgtcatccacgaaaagcacatttataaggagtacatcggtctggacgcctgcgccgcaaacctgatgcgccccgccatgtacggcgcttaccaccacatcaccgtgctgggcaaggagaacgagccctgcgaccacaagtacgacgtggtgggcggcctgtgcgagaacaacgacaagtttgccgttgaccggatgctgcccaagatcgacatcggggatatcctttacatccatgataccggtgcccacggctctgctatgggctacaactacaacggcaagctgcactgcgccgaggtgctgctgtgcgaggacggctctcaccggctgatccgccgcgcccagaccccccgcgattactttgcaacgctggactttttgccctttatgaagcccctgtttgaggactga

SEQ ID NO: 2909 - DNA, 1392 bp, Faecalibacterium prausnitzii 1 (SL3/3 - M21/2)
gtgttggtaaatctgtacaccccggcggtacaagtaacgagatggaatgctttcagtagccttaacaggcctgttgcacaggcctttgacaaggagatcataaaagtggagaaatttgttattaccggcggtaagcctctgcacggagaagttactatttccggcgcaaaaaatgcggctgtgggcattctgcctgccaccattctggcagcggatgtctgcgtgatcgaaaatctgcccgatatcagcgatgtgtcggtcagcctcaagatcctgagcacccttggtgcacaggtgaagatgctcaaccgcaacacctacgagatcgatacgcggcatctggtcactaccaatgtgccggacgatctgtcccgccagatgcgcgccagctactacttccttggcgcactgctctcccgcttcggcaaggcacaggtggccatgcccggcggttgcaatctgggcccccgccccatcgaccagcacctgaaggtgttcagcgcactgggcgcagaggacagcgtggattacggcatgatcaccgtgcgcaccaagcaggagctgacgggtgcccatatcttctttgataaggtcagcgtgggcgctaccatgaacggtatgctctctgcggtcatggccaaggggcagaccattctggaaaactgcgccaaggagccccatgtggtggatctggcaaactttttgaatatgtgcggcgcagatgtgcgtggtgccggtacggatgttatcaaggtacgcggtgtggaaaaaatgcacggctgcacttacagcatcatcccggatcagatcgaggccggcagctatatggtggctgcggctgccaccggcggcgatgtgctcatcaagaatgttacccccaagcacctggagcccatcacggccaagctgcgccgtgcaggggtcactgtggaagaatttgacgatgctgtgcgggtatcccgcaccggcgatattctgccgctgaagatcaacaccatgccgcaccccggcttccccaccgatatgcagcccctgatgggtgtgctgctgagcgtggctaagggcaccagcaccatcaccgagagcgtgtgggacaaccgcttccgctatgtggacgagctgcgcaagatgggtgccagcgtgcaggtggatggtcaggtggccgtgtttgagggcgtagaaaagctcagccccgcaccgctgcgcgcttccgacctgcgtgccggtgccgccatggtggtggctgctctgatggccgatggcaccagcgagatcgaggaaatcggtcatatcgagcgcggctacgagaatatcgtggaaaagctgcgcggtctgggcgctgatatcagcaaggtggagcggatgcctgctgcgctggaacaggccctgtaa

SEQ ID NO: 2910 - DNA, 1533 bp, Faecalibacterium prausnitzii 1 (SL3/3 - M21/2)
gagaggaaaacattcatgaacgagatcaaggttgagccttatatccccgatgaggactacgataaccccgcgatggtggtggatttttatgaattcaccatggcaaactgcctgttcctgcatggctttaagaataccacgctggtgtttgatatgttcttccgcaaaaacccggataatcagggctattccatcagcgcaggccagcgcaaactgacccgctttttgctggactatcacttcaatgagcaggatatccactggctgcgcaccaagggcatgagcgaggagttctgcgagtatctgcgcacctacaagtggaagggtgatatgtacgccctgcccgagggcacggtctgctacccccatgtgcagatggtgcgcatcgagtgcgatctggtgggcgcgatcctcatcgagacctacctgctgcagaccatgaacttccatagcctgatcgccaccaaggccacccgcgttaccggtctgaacacccacaccccccgcaacgtcatggagttcggcacccgccgcgcacagggcgagagcgccggtaacgatggcgcttacgcagcagtgctgggtggctgcatcggtacggccaactgtctggcagagatgaagttcggtgcagaggtcaaggccgtgggcaccgtggcacacagctttatcgagtttttccccaccgagttcgatgccttcaaggcctttgccgatacctacccggattcggtcagtctgctgctggatacctataacattatggagagcggtctgcccaacctgatcaagctggacgattatctcattgagaaataccccaacgatcccaaccgccgcgtcaagagcgcccgcatcgattccggcgaccttgcccgcggctccaagcggctgcgcaaggcactggatgccgccggtaagccctacatcaagctggtagcctccaacggtctggatgagaagaaaatcgccaacatggaactatacgagcacgcacacttcgactcctacggcgtgggcgaaaacctcatcacctccgcctccgaccccgtgttcggcggcgtgtacaagctggtggcggtgaagaagccggacggcagctacacccccaagatgaagtgctcggactccgccagcaaggccatcatcccgggcaaaaagatgccttggcgtctgtacgatgaaaacggtcaggcacagtgcgacctgattgccatggacggcgaggttatcgaggccggtaagccggtcactatggtcaatctggactcggacgctatcgaacgcaccatcacctttatccctaccgctgtgcgcccgctgctggtgccgcatattctgggcggcgagctggccattgaactgccctctattgcagaaaagaaggcctatattgcaaagcagctcaccgaggagacttgggagagcgagttgcgtctggaatgccctcacaagcactacgtcaacatgacccccgcagtggccgagtgccgctcccggatgtacgccgaactgcacggcggcaaggtgtaa

SEQ ID NO: 2911 - DNA, 1674 bp, Faecalibacterium prausnitzii 1 (SL3/3 - M21/2)
ttgcgcaagcaccattttcacaaaaaacaggacaatataccgcccaaaacggcctatcctgccggaattgcgttcggcgctttgttttgcattgcaccccaccccgggctgtggtatacttatattcgtgattttaaagcccgggtatggtgtgccgggccaccagagaggaaacgaacgatgaaaataggatttgacaacgacaaatatcttgcgatgcagtctgagcatatccgcgagcgcatcaagaagtttgacaataagctgtatctggaattcggcggcaagctgttcgacgattaccacgcctcccgcgtgctgcccggctttcagccggactccaagctgcaaatgcttttgcagctcaaggagcaggccgagatcgtcatcgtcatcagcgccgaggacatcatcagcagcaaggtgcgcggcgactacggcatcacctacgatctggacgtgctgcgtctcatcgatgcttttcaggagatggggctgtatgtgggcagtgtgtgcgtgaccaagtacaccgccgccgccgaggtggaagcctttgaaaagcggctgagcagtctgggcatccgcaccttccgccactacaagatccccggctaccccaacgatgtggcccgcattgtcagcgatgagggctacggccgcaacgagtacattgagaccgagcgcccgctggtggtcatcactgcgcccggccccggcagcggaaagatggccgtctgcctgtcccagctgtatcatgaatataagcggggcgtcaaggctggctacgccaagttcgagaccttccccatctggaacattcccctgaagcacccggtcaatttggcctacgaggctgctaccgccgacctgaacgatgtgaacatgatcgaccccttccatctggaagcctacggcgttaccaccgtgaactacaaccgcgacatcgagatcttcccggtggtgaatgcgatgttcgagttgatcgcaggccagagcccctataagtcccccacggacatgggtgtgaacatggccggcaactgcatcgtggacgacgcagtctgctgcgaggcctcccgcaaggagatcgtgcgccggtactacaagtgcctgtgcgagcagaagatcaccggcaccgccaaggagagcgagcgctacaagctggagctgctgatgaatcaggccggactgaccatgggggcccgggaagtggaaaagcaggcacacgcccgcagcgaggctaccggcggcgcaccggctgctgccattgagctgagcgacggcactgtcatcaccggcaagaccggcccgctgctgggtgctaccgcaagcgccctgatcaatgcgctcaagtatctggcgggcatcccgcaggagacggatctggtcagcgccgctgccatcgagcccatccagaccctcaagaccaactatttgggcggcaagaacccccgtctgcataccgacgagatcctgatcgccctgtccagctctgctgcctccagcgagcttgccgcagcagccatgcaccagctgcccaacctcaagggctgcgatgtgcactccaccgttctgctttccagcgtggacagcagcaccctgaaccgtctgggcatgtacctgacctgcgaccccgtctacgaggaagaggatcgcaagtaccataagctgtaa

SEQ ID NO: 2912 - DNA, 1581 bp, Faecalibacterium prausnitzii 1 (SL3/3 - M21/2)
atgcggaagtcctgcttttttgcttgtctgccgaagaaaagttcgcttaaaggatgcagcatttcttcatataaaaagtcatacttattttacatcttatctgcattttgctataatattttcgcttttttgcaaagcatccgaaccgcagaaacctttaaaaccttgaggagagtggaatttttgaaggaagtcaagcttgaagaagcggcttatcagtttgaagccaaaatgtccctgcggcaggccatcccgctgggcttgcagcatgtctgcgctatgttcgtgggcaacctgaccccgctgctgatcatcactagcgcctgcggcattgcaggcggcgagtttgcagacctgcaggtcaccctgctgcagagtgccatgttcgtggcaggtatcgtcacgctggtgcagctgttcaccatcggacccgtgggcggcgcagtgcctatcatcatgggtaccagttccggctttatcggcgtgttcaacagcgttgttggcacgatgggcggcggtgtgctggcctatggcgcgattatgggagcatccatcatcggcggtatttttgaaagcgtgctgggcttcttcctgaagccgctgcgcaggttcttcccgccggtggtcaccggcacggtggtgctttccatcggtctttcgctgatctcggtgggtatcaactccttcggcggcggcaacaaggccaaggacttcggctctgtggagaacctgcttctggcactgttcgtgctggtggtcatcctgttcttcaaacactggaccaccggcttccttagctcctctgccatcctcatcggcattctggccggttatgtggttgctttcattatgggtctggtgctgcccaccaccggcgtgactgctgatggtgtagagttcaccaaggcatgggtgctcaactggaacaaggtggcacaggcctcctggttcgcagtacccaagctgatgccggtcaaggtggtattcgatgcccgtgcaatcctgccggtgctgatcatgttcatcgttaccgcagtggagactgtgggcgatatctccggcgtgatggagggcggcatgaaccgtgagccctctgataaagagctgtccggcggcgtcatctgcgatggcctcggctccacctttgccgcactgttcggcgtgctgcccaatacctccttcagccagaacgtgggtctggtggccatgaccaaggtggtcaaccgtatggcactggcctccggtgccgtgttcctgatcctctgcggcctgatccccaagctgggcgcgctgatctctatcatgccgcaggccgttctgggcggtgctgccgttatgatgttctcttccatcgtggtcagcggcatccagctgatcaccaaggaaaagatgactccgcgccacctgaccatcgtgtccgtggcactgggcgtgggctacggcatgggtgccaacagcggcattctggcacaggctccgcaggccttccagctgatctgtggcgagtccggcattgttccggccgcctttgtggcaattctgctgaacgtgctgctgcccaagaacgatatggcagaataa

SEQ ID NO: 2913 - DNA, 939 bp, Faecalibacterium prausnitzii 1 (SL3/3 - M21/2)
atgcctgaatttttgcgcgatacacgcagcaaaggagtttttactatgaagaagcctgtctttaccggtgcgggtgttgccatcatcaccccgatgtacgaggacggaagcatcaactttgacgagttgggccgcattatcgaggatcagatcgcccgccacaccgatgccatcatcatctgcggcaccaccggcgagtgttctaccatgaccgacgaggagcagctggccgccatcaagttcaccgtggatacggtcaatcaccgcgtaccggtcattgccggtgccggttcgaacgataccgaccacggctgcgcactggcagcaaagtctgccgcctgcggtgccgatgccctgctgatggtcaccccctactacaacaagacctcgcaggccggtctggtggcgcactttaccgccatggctgaggccggcggcatcccggtcatcctgtacaatgtaccctcccgcacgggtctgaacattgcacccgagactgctctggagctgagcaagcacccgctcatcaacggcatcaaggaggcctccggcaacatttctcaggtggccaaggtggctgcactgtgcggtgatgcgctgaacatctactccggtaacgacgatcaggtggttcccctgctggcactgggcggcaagggtgtcatcagcgtggtgtccaatgttgcgccggaactggtgcataactgctgtcaggctttctttgacagagataccgccaaggcctgcgctttgcagctggaaatgctgccgctggaggaggctctgttctgcgaggtgaaccccattccggtcaagtatgccatgaacgtgctgggctggaacgcaggcgaatgccgtctgccgctggtagagcccagcgatgcccacaaggcaaagatcgagcaggctctgctggctgcaggtctgatcaaggaataa

SEQ ID NO: 2914 - DNA, 2661 bp, Faecalibacterium prausnitzii 1 (SL3/3 - M21/2)
atgcaatggaccggtttgaatgaactgcgcgaaaagtacctgagcttctttgaaagcaagggtcatctgcgtctggacagcttccccctggtacccaagaacgaccccagcctgctgctgatcaacagcggcatggcccccatgaagaagtggttcctggcacaggaggagccgccccgccaccgcgtgactacctgccagaagtgcatccgcaccccggatatcgagcgcgtgggcatcactgcccgccacggcaccttctttgagatgctgggcaacttctccttccaggattacttcaaggacgaggtcattccttgggcttgggagttcctgaccagcgatgagtggatggctatccccaaggaccgtctgcacatctctgtgtatgaggaggacgacgaggcctacgatatctggaccaagaaggttggcatcgccccggaccacatggtgcgtctgggtaaggaggacaacttctgggagcacggctccggcccgtgcggcccctgctccgagatctactttgaccgcggccccgagtacggctgcggcaagccgacctgcggcgtgggctgcgactgcgaccgctatatggaaatctggaacctcgtgttcagccagttcgatgccgacggcaagggtcactacgagcgtctggcacgccccaacattgataccggcatgggcttggagcgtctggcctgtgtgatgcagaacgtgggcaacctgttcgaggtggataccgtgcagagtgtgctgcaccatgtggagcacattgcaggcaagacctacaagcaggaccccaagaccgatatttctatccgcgtcatcaccgaccatatccgcagctgcacctttatggtgtctgacggcatcctgccctccaacgagggccgcggctatgtgctgcgccgtctgctgcgccgtgccgcccgccatggccggatgctgggcatcgaccaccccttcctcgtggatctggtggagaccgtcatccagtccagcgagtccgcttaccccgagctgcgtgagcatgacgcctatatcaagaaggtcatcggcaccgaggaagcaaactttgcccgcaccatcgatgccggtatgaacatcctgaacaacatgatcgaccgtctggagaaggcacaccagaagctgctgagcggcatggacgccttcaagctgaacgataccttcggcttcccgctggatctgaccaaggagatcgccgccgagcagggtctggagatcgacgaggacggcttccacgcagagatgaagaagcagaaggagcgcgcccgcgctgagcgcctgaagaagaacatctccggctggagcgaggatctgttcggcgcactggaggctgagcccaccgtctttaccggttacgacaccctgaccgacaagggcaccgttgtggcgctgagcgatgaagagaccctgaccgatgccattgccaccgacgaggaggcaaaggacggcgtgctggtggtgctggataagacccccttctacgcagagatgggcggtcaggctgccgaccacggcgtgctgaacggtgccgagtgcagcctgcgtgtgctggacgtgaaaaagacccccaagggctactacgtccacacctgcgtgctggaaagcggcattgtgaaggtgggcgatgtgctgaccgcacaggtggacaagggctaccgcatggccattgcccgcaaccacaccgctacccacctgctgcaggctgccctgcgtgaggtgctgggcgaccatgtgcatcaggctggttcctatcaggatgcctccatcacccacttcgactttacccacttcagcgccgtgacccccgaggagctggcacgggtgcagaagatcgtcaatgataagatctttgactccatgaacgtcaccgtgcaggagatgccggtggaggaagccaagaagctgggcgcaatggctctgtttggcgaaaagtacggcaaggtggtccgcgtggtggatatcgagggctggtctaccgagttctgcggcggcacccatgtcaagaacaccgcccagatcggcggcttcaagatcgtcagcgagtcctctgtggctgccggcatccgccgtatcgaggctgtcaccggccgcaacctgctgatccgtgcaaacctgcaggaggccatgctgcatgatgtggccaacaccctgaaggccaacaacgtggcttctctgcccgcccgcgccgaggctgtgatggctgagaacaaggccatgagccgcgagctggacgagatgaaggccaagatcgccgcctccaaggtggacagcctgttcgacaatgccgaggaggcagacggcgtgaagatcgcctccgcatactttaccggtactactggcgacaccctgcgcggtatgtgcgacagcatccgcgacaaggccgtgaaccccgtggtggctgttctggtgggcaaggctgaggataagatcaccatggctgttaccgtgaataagctggcacaggaaaagggcctgaaggccggtgtgctggtcaaggagttgtctgctattgccggcggcaagggcggcggcaagccggactttgcaatggccggtctgaaggacgagaccaagatcgacgaggcactggcttctgtgagcgccatcgtcaagaaggctctgggctaa

SEQ ID NO: 2915 - DNA, 1479 bp, Faecalibacterium prausnitzii 1 (SL3/3 - M21/2)
ttttttgcctgtgcaaccaattgggtcttgcatacaacaggcaaaacgggtacaatagaattgcagcttattttgcacattttacaaaaagcaaatacacaagctgcaaatatttttgtgtcagttgcggcagatggctgttttgccgtcccggtccgttggcagtgcagggccgacagaccactttactggacggtgcggaaagccgtttgcccggcagcggacacattttattatgatctgaaggaggtttccatggccaagaatatcatcattggtcagagcggcggccctaccgccgtgatcaactccagccttgcaggcgtatacaaagctgcccgcagtctgggtgcagacaaggtgtacggcatgaagtacggcatcgagggtctgctcaaggaagagctgctggagctcaacgttctgctggatgaccgcatgagcatcgagctgctcaagcgtactccgtccagctatctgggcagctgccgcttcaagctgcccgacccggataccgatgccactccgttcgtcaagctgttcaccctgtttgacaagtacgacatctgtgccgtgttctacatcggcggcaacgactcgatggataccatcgcaaaactgtcccgctacgggcagcaggtgggcagcaatgtgcggttcatcggtgtgcccaagactatcgacaacgatctgtgcctcaccgaccacacccccggctacggctctgccgcaaagtacattgctaccatcttaaaggaagtcatccgcgactcctcggtgtataacatccgcagcgtgacggtggccgagatcatgggccgccacgcaggctggctggccggtgcggcctgtctggcaggcggcgaggactgcgaaggccccgacctgatcctgctgccggaagtgccctttgatcaggacaagttccttgcccgggtggacgagctgcagcgggtaaagtccaacgttatcatcgcagccagcgagggcgtaaagaccgcagacggtacttacctgtgcgatctggtgtccaccgccggccagctggacgcttttggccacaaggccatcctcagcggcaccagccgttacctttcggagctcatccacgacaagctgcagtgcaagagccgtgccatcgagttctccaccctgcagcgctgcgccagccatttggccagccgcacggatgtgaacgaggcctacgccgttggcggtgccgccgccgctgctgcctttgcaggcgagagcggccgcatgatcgccctcaagcgggtctccaactacccgtaccagtgcatcaccgagtctgtggatgtgcagcaggtggcaaatctggaaaagaaggttccgctggaatggatcactccggacgggatgcaggtgaccgaagcttttgaggagtacgcccgtccgctgattttggatgaggtgacccccgtgtatgtgaacggtaccccccgccacatccgtctgtga

SEQ ID NO: 2916 - DNA, 870 bp, Faecalibacterium prausnitzii 1 (SL3/3 - M21/2)
accggccgctcgaaaccgatgctggccggttctttttgcagtacgggctgcggacgggctgtcttgaccgtcaaaaatcttgatgtcaggagcgaatacgattccatgatcgattttgaacacgtttccaaagaatataaaaagggtggccgccttgcactggaggatatcaacttccacgtggatgaaggcgagttcgtctttctgctgggtcactccggcgcaggcaaatccaccctgctcaagctgattctgcgggaggcactgcctacctccggcaaggtgaccgtgctgggcaaggacgtagccaagctgcgccgccacaagatcccttacctgcgccgtcagatgggcatcatctttcaggacttccggctgatccccagcatgaccgtgtacgagaatgtggcctttgccatgcacgtcctcaacgtgccccacaaggagatccgtccccgcgtggagtacattctggagctggtgcatctggaggataaggccaagtgctacccggataccctttccggcggcgagcagcagcgtgtggctgtggcgcgtgcgctggtgcataaccccaagctggtcatcgcggacgagcccaccggcaacattgacccggagctgagtctggaaatgatgcagctgctggagcgggtgagcaaaatgggcatcacggtgctggtggtcacccacgagcacgagctggtgcaccgcttccatcagcgtgtggttaccctgagccatggccgcatcgtctcggacgtgcccgcagaccccgtggccgccgccgaggatgatctttcgctggatgttgccgcctttgatgcggacgatgcggccgctgcaaagaaggaggtggctgccgtatga

SEQ ID NO: 2917 - DNA, 1425 bp, Faecalibacterium prausnitzii 1 (SL3/3 - M21/2)
atgagggcgcatggaagctgcccctcatcagtctgctgcgcagacagcttcccccagagggggaagccttcagaggatgcccgcatacgcgggcagatcaaaaacgggaaggtgaatgatatggctgaaaaaattttggtagtgggcggcggcggccgcgagcacgccatcatcaaggcactgaaaaagagccccgactgcggcgagatctggtgcgcaccgggcaacggcggcatcagctatgacgccaagtgcaagaacatcaaggccaccgatgtggataccatggtgggctttgcagtggaagaaaagtttgattacgttgtggtggcgcaggacgacccccttgcactgggcatggtggacgcactggcaaaggtgggcatccccgccttcggcccggacaaggccgctgcccgcatcgaggcctccaaggtgttctccaaggacctgatgaagaaatacggcatccccaccgcaaagtacgagactttcgatgaccccgcaaaggtcatggattacatccgcgccgagggcaagtacccggtggtcatcaaggcggacggccttgcactgggtaagggcgtgctcatctgcgaaaacgagcagcaggccgccgacggcgttaaggagatcatgctggacaaaaagttcggcgcatccggcaaccatgtggtggtggaggagttcctcaccgggccggaggtcagtgtgctgagctttacggacggcaaggtggtcaagcccatggtctccagcatggaccataagcgcgccaacgaccacgacaccggcctgaacaccggcggcatgggcaccattgcccccaacccctactacaccccggaggtggctgcggagtgcatggaaaagatcttcctgcctaccatccgcgccatgaacgccgagggctgccccttcaagggctgcctgtacttcggcctcatgctcaccccggacggccccaaggtcatcgagtataactgccgcttcggcgaccccgaaacgcaggtggtgctgccgttgctggaaagcgacctgctgcacatcatgcagtcctgcaccgacggcacgctggcacagcaggaagtcaagttctccgatggtgctgcggcctgtgtgattctggcctccggcggctaccctgtggcctacgagaagggcaagcccatctccggccttgtggacggccagctgcccgacgaggagaacgtgacggtgtaccactccggcactgccatcaccgaggacggccagcttgtgaccaacggcggtcgcgtgctgggcgttaccgccatcggcccgcgcctgaccaacgccctgagccacgcctatgaagcagccgaaaagatcagctttgaaaagctgcacaagcgcagcgatatcggcctgcgtgccctgaaagcgctggcagagaagcagtaa

SEQ ID NO: 2918 - DNA, 2109 bp, Faecalibacterium prausnitzii 1 (SL3/3 - M21/2)
ttgcagatagaggagaaagaagaaatggcgaaactggttatcgtggagtcgcctgcaaaggcgaaaaccatcggcaaatatctgggcgatgactacgaggtcaccgccagcatgggccatatccgcgatctgcccgcatctcagctgggcattgatgtggagcatggctataccccgcaatacatcagcatcaagggcaaggaaaagctcatcaaggaactgaagagcaaggccaaacacgccgacggcgtgctgctggcgaccgacccggaccgcgagggcgaggccatcagctggcatctggccaatattctggggctggacccccatgagcccaaccgtgtcacctttgacgagatcaccaaaaagggtgtgaaggagggcatggcccacccccgcgccatcgacgaggatctgttcaacgcccagcaggcgcgccgcgtgctggaccgtctggtgggctacaagctcagcccgtttctgtggcgcaaggtgcgccgcggcctgtccgcaggccgtgtgcagagcgtggcggtgcggctgatcgacgaccgggaaaaggagatcgaaaacttcaagcccgatgaatactggaacgtggacgctaccctgggtgccgggcacaaaagctttgtggcacgccttgccacggacgccaacggcaaaaagctgctgcccaaaagcgaggcggaggcacgcgccattgaaaagggtttggagggcgcaagctatgtggtgagcgagctcaagcgcggcaagcgcgcaaagcagcccactccggcctttatcaccagtaccctgcagcaggaggcctcccgccggttgggctttacagccacccgcaccatgcgcgccgcccagacgttgtacgaaggcgtggatattgccggacatggcatgatgggtcttatcacctatatgcgtaccgacagtctgcgcatctcggacgaagctgtggcggccgccaaggagtatatcgccggtgcttacggcgaggcgtatatctgcccctataagcgcacatggaagaccaaaagcgccacggcagcgcaggatgcccacgaagccatccgtccctctgtgccgtccctgaccccggacgaggtggacaagagcatcagcggcgataccgcaaagctgtaccgcatgatctggagccgctttatggcaagccagatggcagactgccagcaggataccgtgtcggtcaccgtcagcgcggcggattaccacttcaaggccagcggctacaccgtgacctttgacggctttaccgccctgtacgaagaagccaccgacgaaaaggaaaagaaggaaacgaaccttcccccgctggagcagggacaggtgctcaagctgcgggagctgaagagcgagcagaagttcacccagccgcccgcccgctacactgaagctaccctcatcaaggcgctggaagaaaacggcatcggccgcccctctacctacgcgcccatcatcaccaccatcatcgaccgcggctatgtggaacgcgaccagaaaaagctcaagcccactctgctgggacgggctgtggacgggctgatgctggagcagttcccccatatcgtggacgtggatttctccgcgcagatggagaagaatctggataaggtggaaagtggcaaggccgactggcgcaagaccgtggatgacttctatcagggctttgaggccagtctggagcaggccgaaaagaacatggagggcaaaaaggtcaaggtgccggacgagccctccagcgaggtgtgcgacctgtgcggccgtcccatggtcatcaaggtgggcaagtacggcaagttcttggcgtgtagcggcttcccggagtgccggggcaccaagcgccttgtcaaggataccggcggcatctgccccaagtgcggcaagggacgtctgttggaacgcaagagctccaagggacgcatctactacggctgcgagtgctacccggactgcgattttatgacttgggatatgccggtggccaccaagtgcgaaaagtgcggcagcaccctgttccgcaagggcggcaagctgtactgcgccaaggagggctgcggctttgagatgccggtacccaaaaaggactga

SEQ ID NO: 2919 - DNA, 1728 bp, Faecalibacterium prausnitzii 1 (SL3/3 - M21/2)
atgaatacgctggtcatcgtattgatcgcagcggtgtgcctgtttggcgcttatgtgctttacggccgctggctggctaacaaatggggcatcgaccccgcagccaagactccggctgtcgtccacgaggatggccgggactatgtgcccaccaatggctggacggtgtttgcccaccagttcagctccatcgctggtgcaggccctgtcaccggtgccattcaggccgcagctttcggctggctgccggtgctgctgtgggtgctgctgggcggcatcttcttcggtgccgttaccgactttggtgccctgtatgcttccgttaagaacgacggcaagagcatgggtatgctgattgaaaagtacatcggcaagaccggccgcaagctgttcctgctgttctgctggctgttctgcggcatcgtgattgccgcttttgcggacatggttgccggcaccttcaatgccttcggcgcagacggcgcaatggttgaagctgccaagaccaacggcgctgccggtatggtgtccatcatgttcatggtgtttgccgttatctttggcctgctgcagaaaaagttcagcttctccggctggaaggaaagcgttatcagcatcgtgttcatcgtgctgtcctttgtcatcggcgcaaacctgcccctgatcctgggcaaggccgcttggagctacatcacctttgtgtacatcttctttgctgctgtgctgcccatgtggctgctcaagcagccccgtgaccacatgaccacctttatgttcgtggccatgattgtgggtgctgtggttggcctgctggtggcacaccccaccatgaatctgcctgtgttcaccggctttaccaacgaaaagctgggcaccatgttccccatcctgttcgtcaccgtagcctgcggtgcagtttccggtttccacagccttgtttcctccggtacttcctccaagaccgttgagaacgagaaggatatgctgaaggtcggctacggtgccatgatccttgaaagcctgttggctgttctggctctgtgcgttgccggtgctgccgcagctgccgacggtacccctgctgccggtactccgttccagatcttcagccgcggcgttgccggtttctttgagatgttcggtgtgcccgcctacgctgctaccgtgttcatgaccatgtgcgtttccgcactggcactgaccagtctggatgccgtggcccgcattggccgcatgagcttccaagagctgttcagcgtggacgacatggagcacgctgagggctggcgcaagctgttctgcaatgtgtacttctccaccttcatcacgctggtgttcggctttatcctgaccaagatcggttacgccaacatctggcctctgttcggttctgccaaccagctgctgagcgcactggtgctggctaccctgtgcgtgttcctgaaggtgaccggccgcagcaacaagatgctgttcccccctctggtcatcatgctgtgcgttacctttaccgcattggtgcagcgcctgatcgctatggtcaaggccatcagcaccgccgcttctgttaccattcctgccggtgagaccacttggggcgctgtgtttatcgcaaacggcctgcagctgatccttgccgtgctgctgatcgtgctgggcctgaacattgtgttccactccttctctgcatacaagaaggccgagcacaacagcgaggcaaacgtctga

SEQ ID NO: 2920 - DNA, 1998 bp, Faecalibacterium prausnitzii 1 (SL3/3 - M21/2)
atgaaacgtaaaccaagatggacactggaaatgctcacggccagtctggcggtgctgtgcggccttttgctgctggtactgctggtgcagcgccccacggcatggctgctgctggccgtgctggtggtgctgtggggcataggggcaaccttgttccgctgcaagctgcgccgctgggtggtgcgctggacaagcggcaccacctttgaaaaatccaaggtgcagttcagtctggagcccctttcccagccggcggcgctgctctccggcgagacggtgctgtggtacaacagccagttccgcacccgcctgctgggcgggcaggatgtgctggccagccgggtgcagaagctgctgcccgggctggatctgcagctgtgccgcaagcgcgagggacagctgctgacccttgccgacggctactggagcgtgcacagctccaccgtgcccggcgaagccgaaagcgtgaccctgctggtgctgaacgaggagaccgagctgcgccgcattgaggcagagtataaggccagccgtccgggatatcttgccttccagctggacggctacgatgatgtgttcggggatctgatggacagcgagcgcgcccgcctgctggagggcgtcaaccgcattctggaggatatgatcgggcgcggcagcggctttctgcgccgggtaggcagtggcggccgctacatcgcagtggtggaggagcgccagctggagcagttcgccaaccgcggctacgacgtgctggataagatccgcgcactggaccccagtgtgagcctttcaatgtccattggtatcggacgcggcgcgcgcaccctgcgggaggcgcaggatatggccgagcacgcactggatatggcgcagggacgcggcggcgatcaggccgctgagatgacgctggacggatttaccttctatggcggcgtgagccacggcgtggaaaagcgcagtaaggtgcgcagccgccttgtggctgaccagctggtcaagctgatcaaggaggccgaccatgtggtcatcatgggtcaccgcatgagcgatctggatgccatcggcgcagccgagggtgtgctgcgcatttgtaagatctgcgatgtgccggcggtcatcgccgtccggcgagacgctacgctggcggccagtctgatcgatgcgctgtgcaaggcggggcagaaggatgacttcatcgaccccaaggacgccctgcccatcatctccaagcgcaccctgtgcattgtggtggatacatatcaggctggccttgtggaaagcaaggacattctggaaaaatgcggcaaggtggccgtcatcgaccaccaccgcaagggcgtgggctacatcgaaaacccggcgctggtctgccacgagccctattcctcctcggccagcgagctagtcaccgagctgctgcagtatgtgggcgagcgggacgacaagcccaaccgcgtggaggccgaaggtctgcttgccggtattttgctggatacgcaggactttaccctgcacaccggtgtgcgtacctttgaagccgctgctgccctgcgccgctacggcgcagagaccgagcgggtgcgccgattgttcgatgtgaccatggtggaatacaacgccaaggccgatttggtggaaaaggcgcagatgtacaaaaactgtgccatctccattggcggcgaggtggccccggaggcccgggtcgccattgcgcaggctgccaacgacctgctgcgcattcagggcgtggacgccagctttgtggcagtgcaggtgggcaacggggtcaacgtctctgcccgcagcatgggtgccgtgaatgtgcaggtgatcatggagtcgctgggcggcggcggccatcagaccatggcagcagcccagttaaagcatatcaccccgcaggcggcacgcagccgcattcaggatgccatcgaccaatattatctctcccagaaaaagactacgccggaagcacgaccggcaaaaggggaataa

SEQ ID NO: 2921 - DNA, 3693 bp, Faecalibacterium prausnitzii 1 (SL3/3 - M21/2)
atggtctatcgtatttatgtggaaaaaaagcccggctttgatgtcgaggccaacggtctgaaaaatgaactcaccagcctgctgggcatcaaggacctgaccggtctgcgcctgctgaaccgctacgatgtggaaggcatcgacgaggcactgttcaaccagtgcgtcagcaccgtgttcagcgagccgccggtggataacacctacgccgagctgcccgctgccgagggcgtgtcttttgccgtggagtatctgcccggccagttcgaccagcgcgcagcttctgctgccgagtgcatccagctcatcagtcagggtgagcgcccgctggtgcgctctgcccgtgtctacctgctggagggcgctctgacccccgagcaggtggccgagatcaaaaagtatgtcatcaaccctgtggaagcccgcgaggcttctctggagaccaaagagaccctgaagatggattaccccgtgcccgctgccgtggcagtgctggagggcttcaaccagctggatgaggctggtcttgccaagttcattgaggaaaagggtctggccatggatctgggggacatcaagttctgccaggagtacttccgcaccgagcagcgcgaccccaccatcaccgagatcaagatgatcgacacctactggtccgatcactgccgccacaccaccttcggcaccattctggacgatgtgcagatcgatgacgctgtggtgcaggaggcctttgaccgctacatggcgatgcgcaccgagctgggccgcgagaacaagccccgctgcatgatggaccttgccaccattggtgccaaggagctgaagaagcagggtatcctgaagaatctggacgagtctgaggagatcaacgcctgcaccgtcaagatcaagtgtgacgtcaacggcaaggatgaggactggctgttcctgttcaagaacgagactcacaaccaccccaccgagatcgagcccttcggcggtgctgccacctgtatcggcggtgctatccgcgacccgctgtccggccgcagctacgtctatcaggctatgcgtgtcaccggcgcaggcgacccgctcaagccggtcagcgagaccatgcccggcaagctgccccagcgcaagctggtcaccaccgcagccgccggttactcctcctacggcaaccagatcggtctggctaccggtcaggtggacgagatctaccaccccggctatgtggcaaagcgcatggagatcggcgctgttgtgggcgctacccctgcttcccacgtccgccgcgagtgccccgctcccggcgatgtgatcgtgctgctgggcggccgcaccggccgtgacggcatcggcggtgctaccggttcctccaaggcgcacaagctggacagccttgagcactgcggtgcggaggtgcagaagggcaatgcgcccatcgagcgcaagctgcagcgcctgttccgccgcgaggacgcctgcaagatgatcaagcgctgcaacgactttggtgccggcggcgtttccgttgccatcggtgagctggccgacggcctgtatatcgacctgaacaaggtcaccaagaagtacgagggtctggacggcaccgagctggccatcagcgagagccaggagcgcatggctgtggcccttgccccggaggatgtggacaagttcatcgccattgccaccgaggagaacctcgaggctacccctgtggccaaggtcaccgaggaaaagcgcctgaacatggtgtggaacggcgtttccatcgtgaacatcagccgtgagttcctgaactccaacggtgcagagaagcaccagaacgtccatgtggaaaagggcagcgtctggcagccccagtgggcaggcctgaccttcagccagaagatgaagtccatggtgggcgatttgaacgtctgcagcaagaagggcctttccgagcggttcgactccaccatcggtgcagccaccgtgctcatgccctttggcggtgcataccagctgaccccccagaacgccatggtagcaaagctgccggtggacggcgagacctccacctgctccggcatggcatggggctataacccctatctgatgagcgccaaccagtatgtgggtgcacggatggctgttattgagagcgtgaccaagctggttgccaccggcttccgctacgaggacgcttacctgaccttccaggagtacttcgagcgtctgggcaacaagcccgagcgctggggcaagccgctggctgccctgctgggcgcactggatgcgcagatcggtcttggcattgcttccatcggcggcaaggacagcatgtccggctcctttgagcagctggatgtgccccccacgctggtgtcctttgccactgccattggcaaggcaagccgcgtagtctccaccgagttcaagaagccggagagcaccgtggtgctcgttcgtcccatcatcgacccggagaccggctgccccaacttcttctccctgaaggccaactacaagatcgtggagaacatgatcgaagaaggcatggtcgcttctgcctgctccgtgggctacggcggcattgccgaggcactgttcaagatgggtctgggcaaccgcatcggcttcaagatgcgtgcggacatgaccacccaccagatgtttgagcccatgtatggctccatcattctggaaatggtgtctgattctcccgccggtatgctgctgggcgagactaccaaggagtacaccttcgagtcctgcggcgaaaagctggatatggccgaactgcaggagatctgggagagcaagctggagcctgtgtatccctaccgcaaggccggccccgctgtggaaaagatcaacggcagcctgaccgctcccgctgcacccaagatcggtgttgcaaagcccaaggtcatcatcccggtgttccccggcaccaactgcgagtacgacaccgccaaggcctttgcccgcgccggtgctgaccccgagattctggtggtacgcaatctgacccccgccgatgttgccgagagctgcgaggcactggtcaaggccattgacgcaagccagatcgtcatgctgcccggcggcttctccggcggcgacgagccggacggcagtgccaagttcatcgcctccttcttccgcaaccctgcggtcaccgaggctgtgcgccgtctgctgcagcagcgcgatggcctgatgctgggcatctgcaacggcttccaggctctgatcaagctgggtctggtgccctacggcgatatccgccccatcaccgcctgcgaccccaccctgaccttcaacaccatcggccgtcaccagagtatgctggtgcacacccgtgtggcttccaccggcagcccgtggctcagcaagtgcgaggtgggcgagatgcacaccattgccatcagccacggcgagggccgctttgtggctccgcaggaggtgctggacaccatgctgcgcaacggtcaggtggctacccagtatgtggatctgaccggcgtgcccaccatggatcagagcttcaaccccaacggctctgtgctggctatcgagggcatcaccagcccggacggccgcgtgttcggcaagatgggtcactcggagcgcagcggcgagtacctgtacaagaacgtcacaggcgataaataccagccgatctttgagggcggcgtggactatttcaaggtttga

SEQ ID NO: 2922 - DNA, 1548 bp, Faecalibacterium prausnitzii 1 (SL3/3 - M21/2)
atgcaaagcaagtttataaaggagatcaataagatggaaactttgaactacaaggttctggaaggcactggctacaacggctacatcctgaaggatgctcccgttaaggtgatgcagttcggcgagggcaacttcctgcgtgctttcgtggactatttctacgatattgcaaacgagaaggccggctataacggcaaggtcaagctggtgcagcccatcggcaacttcccccagatggcagactggatcaacgagcaggagggtctgtacaccctgtacctgcgcggcagcgaaaagggccagaaggtggacgcaaagcgggtgatctcctgcgtgtccgactgcgtgtgcccctacattgataacaagtgggacgaggttctggctctggctcgctctgaggatctggaaactgttgtatccaacaccactgaggccggcattgcctacaccaagggcgacagccagtttgatcaggttccccccaacagcttccccgcaaagctgacccgcgtgctgttcgagcgctacaaggctttcaacggcgctgccgataagggtctggtcatcctgagctgcgagctgatcgacaacaacggcaaggagctgcagaagtgctgcaacaactacgctaaggattgggatctggagcccgctttcatcgactggatgaacaccgccaacaccttctgctccacgctggtggaccgcatcgttccgggccgcatccgtgacccgcaggagctggccgctctggaagaggccaacggctaccacgataccgctctggacgtgggcgaagtgttcggcgtctgggtcatcgagggccctgcaggtctggaggacaagctgccgttcaagaaggccggcgtcaacgtcatggtcgtgcccgacgttaccccctacaagaagcgcaaggtccgcatcctgaacggtgcacacaccggctttgtgctgggcgcttatctggcaggctttgatatcgtccgtgactgcatgcacaacgataccgtgcgcggctttatgaacaagatgctgcatgaggagatcatccccaccctgccgctggacaagaaggatctggaggactttgcctctgctgttgaggatcgcttcaacaaccccttcgtcaaccacgagctgatgagcatctccctgaactccacctccaagtggaaggctcgcaacatgccctccttcctcgcttacatcgaggagcagaagcagctgcccaagtgcctgaccatgtctctggcagcctacatcgccttctactccaacgatattcaggagcgcactgctgacggcctgatctgcaagcgccccgcaggcaacacctacaagatccaggacgatgcatgggctctggacttctactacgcacacaaggacgacaccgctgcgcagctggtgcacgctgtgctgaccaacacccagatgtgggatcaggatctgaccaagatcgagggtctggaggctgctgtgctggcagatctggaaatgatccgcacccagggtgccgaggctgcttacaagagctgcctgtaa

SEQ ID NO: 2923 - DNA, 1287 bp, Faecalibacterium prausnitzii 1 (SL3/3 - M21/2)
gtgactgcacgtttttatagccgaaacagaaaaaacaaaaaaggagaaatcatcatgggaaaaaacgcaattgtcggtcagtccggcggccccagctctgtcatcaatgccagtctggcgggtgtctttgaaagctgcaagaaccgcggcgcagacatcgtgtacggtatgtgcaacggtgttgccggtctgctggaggagcgggtggtggatctttccaccctgctgaccgatgacttggacatcgagctgctcaagcgcaccccgtccagctttctgggcagctgccgctataagcttcccgactggcgggatgacgaggcggtgtacaaaaagctgttcgccattctggaaaagctgaacatcggttacttcttctatatcggcggcaacgactccatggacaccatcggcaagctggctgactacggccagcgcgttggcagtgacattcgctttatgggtgtgcccaagaccatcgacaacgacctgatggtcaccgaccacacccccggttatggctctgccgccaagtacattggcgttgtgatgaaagagatcatccgcgacgccaccgtgtacggcaccaagtacgttaccgtggtggagatcatgggccgcaatgccggctggctgaccgctgccgccgcactggccaagagcgacgattgcgagggcgtggacatgatctgcctgcccgaggttcccttcaacgtggagcgctttgtggaaaaggtgcgtgtgatgcaggaaaagaagcccagcatcgttattgccgtgtccgagggcgtaaagctggaggatggccgctatgtctgtgagctggcggacgatgtgcacgccgtggatgctttcggccacaaggcactgaccggtaccgcacggtatctggccaatgtggtggcccgcaatctggacaccaagacccgctgcatcgagctttccaccctgcagcgctgcgccggtcacctgaccagccgcaccgacatcaccgaggcctatcaggtgggtggtgctgccgccaaggcagcctttgagggtgttaccggccagatggttgccctgaagcgcatctccaacaatccttaccagtgcaccaccgagctgcatcccatcagcgaggtcgccaacctggaaaagaaggttcccctgagctggatgaacaacaaccatacccagatgaccgaggacttcttggactacgcccgtccgctgattcaggccgagctgaccccgctgtacatcgccggtctgccgcaccacatctacatgaagaaccagaagtga

SEQ ID NO: 2924 - DNA, 1818 bp, Faecalibacterium prausnitzii 1 (SL3/3 - M21/2)
aactacatggcaagagacaacatccgcaacttctgcatcattgcacatatcgaccacggcaaatccaccctgtccgaccgcattctggagctgaccaagagcgtggacgagcgcaccatggaggatcagatcctggacaacatggatatcgagcgcgagcgcggcattaccatcaaggcgcgtgccgtgaccatgaactatactgcaaaggacggcaagacctacgagttcaacctgatcgacaccccgggtcatgtggactttgcctacgaggtcagccgcagtctggctgcctgcgagggcgccattctggtggtggacgccacgcagggcgtggaggcgcagacgctggcaaacacctatatggcactggagcacgatctggagctggtgcccatcctgaacaagatcgatctgcccagcgcccacccggacgaggtggcgcaggaggtggaggacgtgatcggcctgccctgcatggacgcgccccgcgtctccgccaagaccggcctgaacgtcgatcaggtgctggagcgtgtggtcagtgatatccccgcccccaccggcgacccggatgcccccttaaaggcgctgatcttcgacagcatctacgacagctacaagggcgtcatcgtctacatccgcgtgttcgagggctcggtgaagcccggcgacaccatccgtatgatggccaccggcgcagagttcacgctggtggaggtgggtcacatgggtgccacctccctgaccccctgcgcccagctgcaggccggtgaggtaggctacctgaccgccagcatcaagacggtgcaggacacccgcgtaggcgatactgtcacgctggcagagcgccccaccgcagaagcgctgcccggctaccgtcaggtcaagcccatggtgttctgcggcatctaccctgccgatggtgccaagtaccccgacctgaaggacgcgctggaaaaattacagctgaacgatgcctccctgacctttgagctggagaccagcgccgcgctgggcttcggcttccgctgcggtttcttgggtctgctgcacatggagatcatcaccgagcgcctggagcgggagttcgatctggacatcatcaccaccacccccagcgtgcgctaccgcctgaccttgaccgacggcacagtggaaatgatcgacaacccctccagctacccggaccccagcaacatcgtcaagcaggaggagccctttgtggatgtgcatctgtacacccccaacgactatgtgggcggcctgatggatctttgccagagcaagcgcggcgtgctgatcgatatgaagtatctggacgatgtgcgggtggacctgcactacgcgctgccgctgggcgagatcgtgtacgacttctttgacgccatcaagagccgcagccggggctacgccagctacgactacgagttcaaggagtaccgcgagagcgatctggtcaagctggactttttgctcaacggcgaccccgtggacgccttgtccatgatcgtgttccgggacaacgcctacgccaagggacgccgcatctgcgaaaagctgcgggacaacatcccacgcaacctgtttgagatcccggtgcaggcagccatcggcggcaagatcattgcccgcgagacggtcaaggccatgcgcaaggacgtgctggccaagtgctacggcggtgatatctcccgtaaaaagaagctgctggaaaagcagaaggaaggcaaaaagaagatgcgtcagctgggcagcgtttccctgcccagcgaggcctttaccgccgtgctcaagctggacagcgacgacgattga

SEQ ID NO: 2925 - DNA, 1962 bp, Faecalibacterium prausnitzii 1 (SL3/3 - M21/2)
atgcaaaaacttgtattcaagcaaaaattcctcttgctctcttgcgccggaatgattataataataggtggtagagttttgggttttcccgctctgccatataaaccgacccgctgtaccgggagcttttactcccattggtcatacacagcagcctgcagggatgctgtgccggatataggtaagagagagttgacggaggtatattgcatgagaaagacgaaaattatttgcacccttggcccttccaccgataaggaaggcgttctgcgcgagctgatcgccaacggcatgaacgtagctcgtttcaatttttcccacggttcccacgaggagcatctgggacgccttgaaaagctgaaggctctgcgcgaggagctgggcaagcccgtggccgcactgctggacaccaagggccccgagatccgcctgaaggacttcaagaacggcgttgagaatctggttgcaggccagacctttaccctgaccacccgcgatgtggagggcaccaacgagatctgctccatcacctataaggatctgcccatggacgtggagccgaacggcaccatcatgctggacgacggcctgatcaagctgcagatccagaccgtgaacgacaccgacatcgtctgcaccgtgctgaacaacggcaagatcaagaacaagaagggcgtcaacgtgcccggcgtacacctgtccatgccgtatatgagccagcgcgataaggacgatatcatcttcggcatccagcagggctatgatttcatcgccgcttcctttgtgcgcaccgcacaggacgtgtacgatatccgcaacctgctgaaccagtacgattccaacatccgcatcattgcaaagatcgagaaccgcgagggcgtgaacaacattgacagcattctggctgctgccgatgccgtgatggtggcccgtggcgatctgggcgtggagatcgacttcaccgaactgcccggcatccagaagaccatcatcgaccgctccttctccttcggcaagcccatcgtcaccgctactcagatgctggacagcatgatagtgaacccccgccccacccgcgccgagatctcggacgtggcaaacgccatctacgacggcacctctgccattatgctgtccggtgagaccgctgccggtgcctaccctgtggaggcgctcaagactatgtctgccattgccgagcgcaccgagcaggagggcttccatctgcgcggccgcacgatggattccaaccccggcaagatcagcgtatccgacgctaccgcccatgccgcctgcctgaccgcacgggatgtgaacgccgccgccatcgtgaccgtgtccgagtccggcactaccgctcgcctgctgagcaagtaccgcccgcagcagcccattattgcctgcgtcatgcgcgagcaggtgcagcgtcagctgtccctgagctggggcatcaccccgctgatgatgtctctggcgcacagcaccgatgagctgatcgagatgtccaccgctctggccaaggagaatggctacctgcacaacggcgagctggctgttgtgaccgcaggcgtgcccgtgggcgtttccggcaccaccaacatgatcaagatccacatggtgggcaactgtctggctaccggcgtgggcgtcggccccgagaacaatgatgttgccagcggcaaggcctgcgtctgccgcaccatggacgaggtgcgcgccaagttcaagcccggcatggtgctggtggttccctccaccagcaacgagatgctgagctttgtgcgcgacgctgccgctctggtggtagaggagcccggcctgaacagccacgccgccattgccggtaaggcactgctgaagcccaccgttgtgggtgccgccggtgctaccagccacatccgcgatggtctgatggtggctgtggactgcgcacacggcagtgtgcagcgcctgcagggctga

SEQ ID NO: 2926 - DNA, 1335 bp, Faecalibacterium prausnitzii 1 (SL3/3 - M21/2)
ggaaaaacagctatggcaaataacaattccggcaaaaacgaaaaggatctggtttgcagcttttgcggcaagcatcaggacgaagtggagcgcatgatcattggccccggggtcaatatctgcagcgagtgcatcggcctgtgccacgatctgctctctgacaagccggatcagcccaaaagcgcccgtccggctcgcggtagcgcaagccgcgcccatgtccagcccgctgctgcagatctggatatcaacatcatgaccccggccgagatcaaggaaggtctggatcagtatgtcatcggtcaggacgaggcaaagcgtgtgctgtccgtttcggtctacaaccactataagcgtattctcagcggcaagggcggcgacgtggaactgcaaaagtccaacgtgctgctgctgggtccctccggcgtgggcaagaccctgctggcgcagacactggctaagatgctgggcgtgcccttcgccattgcggatgctactacccttaccgaggccggttatgtgggcgaggacgtggagaacattctgctcaagctgatccaggcggcagattttgatgtgcagaaggcacagatcggcatcatctacattgatgagatcgacaagatcacccgcaagagcgaaaacccctccatcacccgcgatgtgggcggcgagggcgtacagcaggcactgctgaagatcttggaaggcactgtcagcaacgtgccgccgcagggcggccgcaagcacccgcagcaggagttcatccagatcgacaccaccaacatcctgttcatctgcggcggtgcctttgacggtctggacaagtatatcctgcgccgcaccgataagtccgcgctgggcttcggcagtgcgctgaaggataactccaccgaggctgagcgcgcattgctgcgcaaggtagagccccacgatctggtcaagttcggcctgatcccggagctgatcggccgtctgccggtcatcaccgtgctggatgatctggacgaggatgcgctggtgcgcgtgctcaaggagccccgcaacagtctggttaagcagtacaaagaactgctgggcatggataacgtggagcttaccttcacggacgaagctttgcacgccattgcccgcaagaccatcgagcgcaagaccggtgcccgtggtctgcgcagcgtgatggaaagcatcctgctgcctatcatgtacgaggtgcccagcgatgccaccatcatccgcgtgaccgtggatgaggacaccgtggagggcggcgaggcacatctggaatacggtgccgtgcgcaaacgctataaaaatcaggccgctctcagctga

SEQ ID NO: 2927 - DNA, 1290 bp, Faecalibacterium prausnitzii 1 (SL3/3 - M21/2)
atgtctgaatataaatttgagaccctgcagcttcatgtcggtcaggagcaggccgaccccgccaccgatgcccgtgcggtgcccatctaccagactacgtcttatgtgttccgcaacagccagcacgccgccgaccgcttcggtctggccgatgcaggcaacatctacggccgtctgaccaactccacgcaagatgtgtttgaaaagcgcatcgcagcgctggagggcggcgtggcagcactggctacctcttccggtgcagccgccatcacctacaccattcaggcactggcacaggccggtgaccacatcgtggcacaaaacaccatctacggcggcagctacaacctgctggctcacaccctgacccagttcggcgtcaacaccacctttgtggatgcccacgaccttgcacaggtggaggccgctatccagcccaacaccaaggctgtgtatctggagacgctgggcaaccccaacagcgatatcccggatattgatgccattgccgccatcgcccacaagcacggcctgccgctggtcattgataacaccttcggcaccccgtacctcatccgtcccatcgagcacggcgcagacatcgtggtgcactctgctaccaagttcatcggcggccacggcaccacgctgggcggcatcatcgtggacagcggcaacttcgactggaaggccagcggccgttaccccaacattgccgccccgaaccccagctaccacggcgtctcctttgcagatgccgcaggccctgccgcttttgtcacctacatccgcgccatcctgctgcgtgataccggcgctaccatctcccccttcaacgccttcctgctgctgcagggcaccgagaccctgagcctgcgcattgagcgtcatgtagagaacaccaaaaaggtggtggagttccttgccaaccacccgcaggtggaaaaggtgaaccatccctcgctgccggatcacccggatcacgccttgtaccagaagtatttccccaacggcggtgcatctatctttacctttaacatcaagggcggccgcgaggaggcctttaccttcattgataacctgaagatcttctctctgctggccaacgtagcggacgtgaagagccttgtcatccacccggcctccaccacccacagccagctgaccgatgccgagctggccgagcagcagatctaccagaacaccatccgcctgtccatcggcaccgagcacattgatgatatccttgccgatctggaagccggcttcgcagccgtccgcggcaagtaa

SEQ ID NO: 2928 - DNA, 2163 bp, Faecalibacterium prausnitzii 1 (SL3/3 - M21/2)
atgtggtattatctttgtaaaatatgccacaaaaacggagagaacgctccgtgcggcggaaatgagggaaaaaccgatatgaaatacgcaagcaacaacatccgcaatattctgattgccggccatgccggcagcggcaagaccacgctgaccgaagcactggtctatttttcgggcgctgccgagcgtatgggccgggttgaggacggtaccacgatttcggactttgatcccgaggaagcaaagcgcaaggccagcctgtcggcttccgttgtgccggtggagtacgagggcatcaagtacaacctgatcgatgcaccgggtctgttcgactttgaagcaggcgagtacgagggcatccgcgccgccgagagcgtgctggtgtgcgtgtccggccgcagcggcgttactgtgggcgcagagaaggcgttccagctggcccgcaagaacggcaaggccaccatggtgttcgtgtccaagtgcgatctggaaaacgccaactatttcaagatccttgaggatatgaagatccgcttcggctccaccatctgcccctgtgtcgtgcctgcaaagctggatgacggcacccctgtgtacatcaacctgttcagccagaaggccttcaagtacgagggtggcaagcagattcaggtagacctgccggacatcggccaccgcttccagggcctgatcgaggccatgagcgaggccattgcagaaaccgacgatgagctgatggaaaagttcttcggcggcgaaccctttaccaccgaggagatcgtggagggcatgcgcaagggcgttaaggacggcctgatcacccccgtgttctgcggcagcgccgtgaacatgcaggcactggatatgctgctgttcaatatgcataagctgctgcccagcccggagcacgaggccagcacgctggccgaggatgccaacggcgagccggtggaactgcactgcaccgaggatgagcccactgccgcctacgtctttaagaccgtggccgacccgttcgtgggcaagctgagctatctgcgtgttatcagcggcaaggtgaccgcaggcgaaccgctgaccaacgcccgcaccggcgaggtggaaaagatcactaagcccctgaccgtccttggcaagaagcagatcgaaaacgacggcatcggtgccggcgatatcggcgctgtggcaaagctggtaagcgcaaagaccggcgataccctgtgtgatgcagaccgcgtggtcaagctgcccgcacctgtgttccccaagcccagcctgttcatggccgttaccgtggccaagaagggcgacgagggcaagatctccagcgcactggcacgcctgatggaagaggaccccaccctgtgctacatcaataacgccgagacccatcagcaggtcatcggcggcttgggcgagcagcatctggacgtggtcaaggccaagctgaagaacaagttcggcgtggagatcggtctggaagctccccgcatcgcctaccgcgagtccatccgcaaggcctgccagaagcagggacgtcataagaagcagaccggcggccacggccagttcggtgacgttatcatcaacttcgagccctgcgacagcgagcaggtggtgtttgaggagaaggtgttcggcggcagcgtgcccaagaacttcttccccgccgtggaaaagggcgtgcgtctggctgccgaaaagggcgtgctggccggttaccccgtggtcggcctgaaggctaccctgctggacggcagctaccacccggtggacagctctgaaatggcctttatcatggctgcaaagttggcctataaagctgctatgccggaggccggccccgtcattctggagcctatccacaccctgaaggcccatgtgcccaacgacaacaccggtgacatcatgggtgatgtgaccaagcgccgtggccgtgtgctgggcatggagccggacgaggacggcttgcagaccatcattgccgaggtgccgctggcagagcttgcaaactttaccacctttatccgtcagaccacgcagggccgcggctggttcaccaccgagtttgcccgctatgaggttctgcccgagatgctggtgcctgccgttgtggagcaggccaagaagctgggcaatctggacgaggccgcagacgactga

SEQ ID NO: 2929 - DNA, 927 bp, Faecalibacterium prausnitzii 1 (SL3/3 - M21/2)
tgccgtaaaaatttgtgcgttttgctggaaaaatctgtatttcaatggtataatagccgtaagttcccggatttgtgggaaaattggaatttcgcccgtcggaagcggcggcgcgtactgatgatggggaaattacagatggacagagaatggacagagcaggatctgcgtacctttgccgagggcgcacaggctgcgtttgaaacggtattgctggacgagctgccacaggacaccggctggcaggacgaaggcctgcaggtgagttatagcctgtgcaacggccgggtaagctgcgtactgcgccgcacggtgcgggcagacggcaagctgtggcggatcaccatgtctgccccgctggcaggcaacctgctgccggaggagcgcatgagcgcccgcgagcgggaactatgccgcgaggacctgaaccacgattttctttccggcgtgtacaaccgccgctaccttgagaccgtgatcgccgccgagctggatcgctgggcagagcaggggcgcaaggccgctgtggcgctgatatcgctggatcacggcgcacagctgcgggacacctacggtcagccggtgatggatcagctgatctgctttgtggcaaaccagtggaaaaagtatttcgacatcccgggcagtcagatcgtctgccgcctgaccggcaccacctttgtggtaggctgtctggacttggacggcggccagctggccgagcagatgcggaacatctacgccgaaatgccccacgagtgcatcacctccatgggcatgatgaaacgggtgccctttaccctgagcgtcgcagtggcagggctggacgagctggacagcgccgccaactgctggcagcgcctgtacgccatctgtgacgagcggctgcgcggtatccagatctccggcggcaataagatctgctag

SEQ ID NO: 2930 - DNA, 3945 bp, Faecalibacterium prausnitzii 1 (SL3/3 - M21/2)
atggaaaaattcagtgtcaaaaaaccatttacggtgctggttgcagtcatcatggtgctgatgctcggctttgtgtcgatcaccaagatgaaaaccaacctgctgccgaatgtcagcacaccgtatctgatggtggtcaccgtgtatcccggtgccagcccggagcgtgtggagaccgaggtctcggacgtgctgcaaaacgcgcttacggtgccgggtgtttcaaagatcaccgccacctcggctgaaaactacagcctgctgctgatgcagttcgtggatgacacggatatggacagcgcactggtgcaggtgtccaacaagctggatcaggccaagagcgacctgccggagacggcgctgaccccttctgtgatacagtacagcatgaacatgaacgcctttatgaccgtggctgtcagccgcgagggcagttcggtgtacgacctttctgattttatcaagaacaccatgactccctacgtccagcgcaagggcggcgtgtccagcgtatcctccagcggccttgtggagcagctggtgcaggtgcagctgaatcaggaaaaggtggacgccatcaacgaaaagctgatggagcttatcgacactcagctggaagtggcgcacacacagttggaggaggccgaggccaagatcaaggccggccgcgcagaatacgataagcagttcaaaaacttcggcaataccgtgtccaacacggtcatgggcaccctcagctccgaggtcggcgaagccgtagaagtagtgcgcaagcaggcggaggcgctgctgcaaagcgtcaacaacctgatcgccgtggtcaaggagcctgaggtgcagcaggcactcatcgaggtgcaggctggtttgcagcgggtcatggacaagttcaacaacaccggtatgcgggatatcgactccctgatcgagatcgtgtccgagctgcgggatatcaccgataagctctcctctgctttgcagaccctgcaaaaccgcatcaacaccgagaccggtacgcagggcgagggcgctgcggatctggcagacgagctgcaattgcaggacagcctgaacgtcatctataagacgctggaggacaccatcaaggccatggacaacgtgcccggcatgatgagcgagttctccaaagcgctgggcaactttacccagcagcagatggtcgcctatatgcagtttaccgaagcccgcgagcagctgaatgagtacgaaaagcagctcagcgaggccaagacccagtacgaggccgccaaggaaaaggcgcttgccagcgccgatgtgaccaagcagctggatatcaagacccttgccaccctcatctacgcccagaacttctccatgcccgccggttacgtcaaggacgaaagcggcgagtcgtggctgctgaaggtgggcgaggaatacgacagcgtggacgatatccgcggtgcactgctgctccatgtggagggctacggcgacgtgcgcctttccgatgtggcagacgtggagatcatcgacaacgccgccgacagctacacccgcctgaacggcgagcaggcttcggtgctgaaaatttacaaggacgacagttccagcgcaggtgacgtatctgccaactgtctggacgctttcaaggagctggaagcccagtacgagggtctgcacgttgtggtgctgtccaatcagggcaactacatcagcatcctcatcaagagcatcctcaccagtatgctggtgggtgccgcactggccatcgtcgtgctggccatcttcctgaaggacgtcaagcccacgctggtggtcggcgtcagtatccccctgtcggtgctgtttgccgtggtgctgatgtacttcacgggtctggacctgaacgtcatgacgctggccggcctgtcgctgggcatcggtatgctggtggataactctgttgttgtcatcgagaacatctaccgtctgcgcggccgcggcgtgcccgccgcccgcgctgcggtgcagggtgcgcgtcaggtgggtatgtccgttgtggcctctactcttacctcggtgtgcgtgttcctgccggcagtgttttctgccagcctcatccgcaacctgatgggtcccatgtccctgtgcatcggctactgcttgatggcttccctcatcgtggcactgactgtggtgcctgctgcctcggctaccgtgctgaagaatgcccagcccaaaaagctggcatggttcgataaaattcagaacgcctacggccgcagtctggaaaaggctttgcagaagcgctttgtaccgctggcagccgccgtgctgctgctggtgttctgctgctggcgggtggtctccatgggcatcgtgctgctgcccaccagcaccagcaacgaggctatgatcaccctttccaccaccgacaccctctcgaaggaggagtcctacgatgtggccggtaaggtggtacaggctgtgatggctgtggacggcgtggaggaggtaggcattacccccgacaacactgtggcgggcatggatgtttccaaccttggcctgccctccaccatcactgacctgctgaacgccgccaacggctacggcaagtataagatcaacgtcaagctcaacgaggagctttcctcttccaagatcgacgccgcctgcaaggccatggaggacgctgtggccgggggggcggactgcaccgccaccgtccagcagtacggcatgacggatgacctgaccagtcagctgtccaccggcctgaccatcaagatctacggcaccgatgccgagaccctgaccgccctgtccgagaaggtggtagacatcgtgaacaacaccgatggcttccagaacgccaccaacggtctgggtgcgggcgattccaccatcatcctgcaggtggaccgcgataaggtacgcgccaacggcttgaccgttgcgcaggtgtaccagcagatcgcggcaaagctgaccaccaccaccacggcacagacccctgttaccgtggacggtaccaccatggatgtgcagatcagcaacaatctggacccgctgaccaaggaaaacatgatggacatgacctttgagaccaccgtcatgtccgccgacggcaccaccgccaccggaacctgcaagctgtcggatatcgccagctggaccaccggcaccgcaccggactccatcaccagcgagaaccggaaccagttcgtcaccgtcactgccgagactgccccgggctacaacaccacggtgcaggcccgtgccgtgaaaaaggcgctggatgcctttgccctcactgatgagatgccggagggctgctccttctccatgggcggcgagagcgacagcgtcaactatatgaccgacgagatgatccagtggatggcactggccctgccctttgtctaccttgtcatggtggcacagttccagagcctgctgtcccccttcatcgtgctgttcaccgtgccgctggcctttaccggcggtctgctgggtctgctgctcaccggccagcagctgaccatgatctccatgatgggcttcatcgtgctgatgggtacggtcgtcaacaacggcatcgtgttcgtggactacgccaaccagctgcgcatgggcggcatggagcgccgcgccgcactggtggctaccggcaagacccgtatgcgccccatcctgatgaccaccctgaccactgtgctggccatgctgcaaatggtgttcagcaacgatatggcaagccagctgatgagcggcatggccatcgttatcatctgcggcctgagctacgccaccctgatgaccctgtatatcgtgcctatcctgtacgatatcctgttcaagaagccgccgctcaacgtggatatcggcagcgacgaggacttggacgacatcccggacgatgccgccgagttcattgccgcccagtcctctgcggcacagcctcagccggaagcataa

SEQ ID NO: 2931 - DNA, 1485 bp, Faecalibacterium prausnitzii 1 (SL3/3 - M21/2)
atggacaaaatgaaaataattttctataattgggctacaaacaacggctgcggacacgagcagccgctacgagcaaaacggagtacgatcccccgatgggtcgaagaagatgaacaaggagaatctaccatgaaaaactgcatttcccgccgttccttcctgaaggctgccggtattctgggcgctgccggtgcactggccgcctgcggcggttcctcctccaccagcactgctgcttcctccaccgcttcctctgctgctgcaagtgcagctagcaccggcgcaagcatcaagctgtggacataccccatcggcggctggggcaatgacgataccgtccagaacctgatctccagcttcaacgcaaagtaccccgacatcaaggtgaccgtggagtatctggactacaccaacggcgacgatcaggtgaacaccgccatcgagggcggcagcgcacccgatctggtcatggaaggccccgagcgtctggtggccaactggggtgccaagggcgttatggctccgctgaacgacctgtggaccgacgacgccaagaaggacatctacgcttctgtggagtctgcctgccacaacgagaagggcgactactacgagtaccccctgtgcatgaccgcacattgcatggccgtgaacatgaccaaggtcaaggaagtgggcgcggacaagtacattgataccgacaagcacacttggagcaccgagggcttcctgaacactgtggacgcactgtacaagggcggctacgagaacgtggcagccatctactgcagcggtcagggcggcgaccagggcacccgcgccatcatcaacaatatgtacggcggcacctttaccgatgcagcccacaccaagtacaccgccgactctgccgagaacatcaaggccattcagactctgtacgatgcaaagggcgtcaacttcgatccctccatcaacggcggcgaggagatcaccctgttccgcaacggcaccctgcagatggctttctgctggaacattgcacagcagctgaacgctgacaccgctgccgcaggccagaccatcagcggcgacgagatcttccccatggcattccccaccgaaagcggcgacccgaagctgtgcggcggcatctggggcttcggcatctttgataacggcgacgaggccaagatcaaggctgcaaagacctttatcgagttcatcgctgccgacccctctcaggtcaaggacagcgtgctggcttccacctacttccccgtccgcaccagcgtgggtgacatctacgccggtaacgaggtcatgagcgagtacagcaagttcatgggctatctgggtgactactaccagatcaccccgggctggaccactgcccgcaccgagtggtggaacatgctgcagcgcgtgggctccggcgaggccgtcgagactgccgtcaagaccttcgtggacaacgcaaacgcagccgctgccgccgaggcataa

SEQ ID NO: 2932 - DNA, 2613 bp, Faecalibacterium prausnitzii 1 (SL3/3 - M21/2)
atgaataccaatcaatatacccaaaagacccttgaggctttgcaggcagcccagcagctggctgtggagtaccagcacaacgcgctggagcccgcccacctgctgcacgcactggttgcgcaggaaaacggcctgatccctcagctgctgcaaaagctgaacgttgaccccggcagctttgccgccgccgtggcagaaaagctgtccgcactgccccgggtgtccggttccggccgcgaccccgataaggtctatatctcgcaggccaccgataaggtgctcagcgccgccgcccgcgaagccaaggccatgaaggacgacttcatcagcgtggagcatctgttccttggcctgctggacgaacaggaccagaccaccagtgagctgttccgcgccttcaacctgaaaaaggacgcctttttgcagcagcttaccgccgtgcgcggcaaccagcgggtgaccaccgataacccggaggacacctacaacgcgctacagaagtacggtcaggatctggtggaacttgcccgcaagcagaagctggaccccgtcattggtcgagatcaggagatccgcaatgtgatccgtatcctgtcccgtaagaccaaaaacaacccctgcctgatcggtgagcccggcgttggtaaaaccgccatcgccgagggtctggcgcagcgcatcgtgcgtggcgatgtgcccgaaaacctgaagaaccgcaccgtgttcagcttggacatgggtgctctggtggccggtgcaaagtaccgcggcgagttcgaggaacgcttgaagagcgtgctgaacgaggtgaagaagagcgagggcaaaatcatcctcttcatcgatgagctgcacaccatcgtgggtgccggtaagaccgacggcgctatggacgcaggcaatctgctcaagcccatgctggcgcgcggcgagctgcactgcatcggcgcgaccacgctggacgagtaccgtcagtatatcgaaaaagaccccgcgctggagcgccggttccagccggtgcaggtggatgagcctaccgtggaggataccatctccatcctgcgcggcctgaaggaacggtacgaggtgttccacggcgtaaagatcaacgatagcgccctgattgccgctgccaccctttccgaccgctatatcaccgaccgcttcctgccggataaggccatcgaccttgtggatgaagcctgcgccatgatcaagaccgagatggacagtatgcccagcgagatggacgatctggcacaccgcatcacccagctgcagatcgagcaggtgagcctgaaaaaggagactgacgccctgagccagagccgtttgaaggatctggaaaaggagcttgccgaattgcaggataagttccgcagcatgaaggcaaagtgggagaacgagaagaacgccattggcaaggtgcagaccctgcgcgagcagatcgagcagaccaatgccgccatcgagaaagcccagcgcgagtacgacctgaacaaggccgccgaactgaaatacggcaagctgccccagctgcaaaagcagctggctgaagaggaaaaggttgctgccgccaagaaggaggacagcctgctgcgtgaccgcgtgaccgacgaggagatcgcccgcatcgtggcacgctggaccggcatcccggtagagaagctggtggagggcgagcgcgagaagctgctgcatctggacgatgtgctgcaccagcgggtcatcggtcaggacgaggctgtgaccaaggtaagcgaggccatcctgcgcagccgcgccggtattgccaatcccaaccgccctatcggcagcttcctgttcctcggccccaccggcgtgggcaagaccgagctggctaaggcactggcacaggcactgtttgacgacgagcgcaacatggtgcgtatcgatatgaccgaatatatggagaagttcagcgtcagccgtctgatcggcgcgcctccgggatatgtcggttatgaagagggcggccagctgaccgaggctgtgcgccgcaagccttacagcgtggtgctgttcgatgaggtggaaaaagcccaccccgatgtgttcaacatcctgttgcaggtgctggatgatggccgcatcacggatagtcagggccgcaccgtggacttcaagaacacggtcattatcctgacctccaaccttggcagtgatatcatcctgaacgatctggagcagcgccgtgcgcagggggccaacgagctgagcgaggatgcaaagcatcagatcgacctgctgctcaagagcaagttccgtcccgaatttttgaaccgtctggacgagatcgtctactacaagagcctgaccaaggacgaaatgcgcaagatcgtggatctgcaattgcaggatctgcgtaaccgtatggaggagggcaagcacctcaagctggaggtcaccaccgccgccaaggacttcatcattgattctgcctacgacagcgtctatggtgcacgtcccatcaagcgcttcatccagagccgcgtggagaccctgatcgccaaggccatcatcaagggcggttatgccgagggcgataccctgacggtggattatgacggcagcgcattggttctgcgttaa

SEQ ID NO: 2933 - DNA, 1368 bp, Faecalibacterium prausnitzii 1 (SL3/3 - M21/2)
atggcacaggcaaaacaggatatgggctctggcagcgtaaaaaagctgatgctgcagctcatgatcccggcggtcgttgcacaggtggtcaacctgctgtataacatcgtggaccgcatttacatcggacatattaccggcatcggcgcggcagcgctgaccggcgtgggactgttcacccccatccttatgctgctgaacgcattcgccatgctggtgggcgcgggcggtgcaccccgcaccgccattgcgctgggacagggcgacaaggagcaggcggagaagatcatctccaacagctttaccatgctgctgctcttctcggtggtgctgaccgtggcgttctacgccggggcacccaccctgctgcggctctttggtgccagtgacgccaccctgccctatgcgctgagttacagccgcatctacattctgggctcggtgtttgtgctgctggtgctgggcatgaaccccttcatcaccacgcagggctttgccaagaccagtatgcttaccaccgtcatcggtgcggtcatcaacattattctggaccccatcctgatctttggtctgggtctgggcgtgcggggcgctgccattgccaccgtgctcagtcaggctgtgggcgcggtgtggatcctgcacttcctcaccggcaaaaagaccatcctgcgcctgcgcaaggactatatgcgcccggaaaagaaggtcatcctgccggtgatggcgctgggcatctccacctttgtgatgatgtccactgagagcctgctgtccatcagcttcagctccagtctggcgcggtacggcggcgacgtggctgtgggcgccatgaccgtcatcaccagcgcttcccagctgtgcaccctgcccattcagggcatctgtcagggcggtcagccggtgatgagcttcaatttcggcgcgggcaaaaagtcccgcgtcaaggaggcattccgcttccagctgaccctgtgcagctgctacacctgcctgttctggctgctcatgatgctggcgccgggggctgtggcgggcatcttcacctcggatacggcgctgatcgactacaccacatggtccatgcgcatctacatggcaggcatctttgccatgggcttccagatcgcctgccagcagagctttatggcgctgggacaggccaaggtcagcctgctgctggcctgtctgcgcaagatcattttgctgatcccgctcatcttcattctgccgcacctgctgccggacccggtgttcggcgtctttctggcagagccggtcagcgatattctggccgccaccattaccaccatcaccttcttctcccgcttcaacggtattctggaacggggcgctgcgaaggtgtaa

SEQ ID NO: 2934 - DNA, 1320 bp, Faecalibacterium prausnitzii 1 (SL3/3 - M21/2)
atggcttcaaagatcaataagggagaaatcctcgccaagttcttcgatgacggggagtacactgcgctgtttgctgatggtgcagtgagcgctgcctgcggctatgctgcaggtcagcaggcttacgccgtttatcagaatggcgaggctgtcaccgtaaaggatgttgaaaagaacatcaaggttctggaaatggctgcacagaccggctgcccggtggtcaccttctataactcggttggtgcaaagctggccgagggtctggacgtgctgaccgccagcgcaaagctgaatgcacagatcgcaaaggtctccggtgttgttccgcaggtggccgttgttctgggtgtctgcggcggcaccagcgctctgagcgctgccaacgcagacgtctgcatcatggccgagggcgcagagctgttcttcaccgctccgtttacctccgctgccaagggcgataaggtcgccgacgcaggcagcgctgccgctgccgccaaggcaggtgtagcctccatcgtggctgccgatgctgcagaggctgctgaaaaggccgctcacatcgtgggtctgctgcccgccaacaacctgactggcccggcaattttcgagttcgagcagcccaccgctgttctggctgccggtgccgagcccgcaaaggccgctgccgctgtgatcgataaggacagcgccgtggagctgtacgcaggctttggtaagtctgtctacaccgcatttgcaaccatcggcggcaacgccgtgggcgttgtggcaaccggcaagcagctgtgccacaactgcgtagccaaggcttcccgctttgtgcgcctgtgcgatgccttcagcgtgcctgtggtcaccatcgtggacaccgagggctttgtgcccagcgttaccgatgacgtggctggcggcatccgcgaggctgcccgtctggccgctacctacgccgatgctaccaccgcaaaagtggcagtgctggcaggcaaggctgtgggccctgtgtacaccactctggctgctgccgacctgcgcatcgctgtgaccggctgcaccgtcagcgcactggagcccagcgccgctgtcagcgtgctgtacaaggacgagatcgatgcttccgacaacatcattgccgccaccaaggctaagactgctgcctacaccgctgaggtgtgcagcgctgccagcgcagtggccgccggtgctgccgatatgagctgtgatgccgctaatgtgcgtgccagcgttgtggctgcactggagctgctgagcaccaagcgcgctgcccgcctgcccaagaagcatggcaatatggccctgtaa

SEQ ID NO: 2935 - DNA, 1323 bp, Faecalibacterium prausnitzii 1 (SL3/3 - M21/2)
agtgtgattttcctttttatggacgatggcagtatgacgctctgggtagcgctggtagtattggtggcattctccgcctttttctccgcatccgagaccgcattttcttccctgaatcagatccgcctgaaaagccgcgccgaggacggcgatgcctctgccgcccgggtgctggcaatggctgaaaaatacgataagctgctttccaccatcctcatcggcaacaatatcgtgaacattgccgcagcttctatcggcaccatcattttcaccaagatgctgggtgcagagcggggcgctacggtgtccaccatggtgctgaccgtggtggtgctgatctttggcgaggtgacccccaagagccttgccaaggagatgccggaaacggtagccaccgcagttgcgccggcgctcagcctgctgatgctggtgtttaccccgctgacatggctgttcagccagtggaagcgccttctggggcactttgtccacagcaccgaggaggacaccatcaccgagggcgagctgatgactatggtcagcgaagccgagaatgacggcgagctgaccgaccgggagagcgagctgatccgcagcgccatcgaatttgatgacgtggaggtggaagagatcctgaccccccgcgtggatgtgatcgcggtggaggacgatatgccgctggaagaggtggcacagacctttgcggaatccggctactcccgtctgccggtgtaccacgacaccattgataacatcattggtgtggtacatgaaaaggacttctacatggcacgcctgaaaaaggagaccaagctggaggatctggtcaagcccaccctctacaccaccggctccacccagatctcccagctgctgcgcaccctgcgtgagcagcaccatcacatggctgtggtggtggacgagtacggcggcaccgagggcattatcacgctggaggacattctggaggagctggtaggcgagatctgggatgagcacgacgaggtgaccgaggacttccgcaagcagtcggacggcagctggatcgtgctgggcagcgccggtgtggacgacctgtacgagcggctgggtctgccggaggacgaggatatcgactccaacacagtgaacggtctggtgcaggaaaagacctgccgcctgcccaaggtaggcgaccgctttacgctgggcagctacgacggcgtggtcacccgcaccgccaagcgccgcgtgaccgaggtgcgtctgaccccggcggaaaagcctgacaccaaaaaggacgaagaggaaaaaggccactttggccggataacctctaaataa

SEQ ID NO: 2936 - DNA, 1449 bp, Faecalibacterium prausnitzii 1 (SL3/3 - M21/2)
atgatccttatgccggaaacccctcaggaaccgcgccacaagttttctgcgcttaccacgctggcggctgtgctggccacctttttgctggcggcggcagcgtatgtctgctggcaggcggcgcacatccttttcccccagaacgtctacgaaacggcgctgcccatcaccatctccgataccattgaagcggacggcgtgctgctgtttgacgagacctgcatttccggcagcggcaatctgggttaccttgttgcggacggcgagcgggtgtcggcaggcactgccgttgcagagctgtataccgatgccaatcaggcggtgctgcgccagcagctgacccagctcaccagccagatcgacctgttgcagcgctcccagaacaccgcagccacccagctggacggcttgctcaaggagcgctccggtgcgctgtatgacctgcttgacgcactggacaccgcccaatacagcgatgtggacgaaagcaccgatgcctatttgctggcgcagaacaagctgtggatcaccaccggcgataccgccggctttgcggatcagatcgcgctgcttgcccagcaggcacagaccgtgcaggcacagctgggcaaccccacccagatcgccgcccccactaccggctactttgtccgagctgccagcagcggacggctgaatgccggtgctgcggacattctggcgcagagcccggagcagcttaaagcctatctggactctgaccccgagatgccgctggatggctgtgtaggtaagctggtggccgggttcagctggcagtacgccggggtgtgctccgcaaagcaggccgaaaagctgctgggcgcggacggtaagcccctgcgcacggcggtggaaatcagcttccccggccagagcgatgctgccttgcgcgccactgtcgccgaggtgaccattgatgcagagcaggatattgcccgctttgtgctgcaatgcaactccatcaacggcgatgtgctgtgcctcaaccacgcccgcgcacgcatcagcaccggcgagagcaccggcctgcgggttcccgccgcagcggtgcactacctcaaggaggacggcaccgaggccgagacgcagggcgaaaactatattcccggcgtgtacgtcaagtacggcaacatcgcccgtttctgcaagattgccccggtggatgccgaccatccgctgatctcggaagacgattacatccttgttttgcccaagggaacggacggttctgtcagtcaggtaaggctttatgacgaaataatcgtctccggacaaaatttatatgacggaaaacttttgtatttattgacatctgctgaaaaaaatcagataatagtaaaagctatttgcattctttttgcaaagaacgccaggcagccgggcgctgcccgaatgaaaggagcagataattatgtctttgctggatag

SEQ ID NO: 2937 - DNA, 1164 bp, Faecalibacterium prausnitzii 1 (SL3/3 - M21/2)
tgtaatgcggctaaattgtttaaaatcacaacccatgccgccgcggcttgcacaaacgaggaaaaggggtatccatttatggccaatagagtatttcaaagcgtgatctaccagatgaaggacgcaatcaatcgggtggtcggcgttgtggatgagactggcgctgtcatttcctgctcggagctgaatctgatcggcgaagtgcgcgagggctatatggccgagcgtctgaccgcaggcgaccgctttgtgcgcgacggctatacttaccagcagttctccaacgccaagcataacgattatgccgtgttcgtggagggcgccgacgagactgcagggcagtttgccggtgtactggccatcagcctgcagagcatcaagcagtaccacgacgaaaagttcgataagtccaactttatcaagaacgtggtgctggacaacatcctgcccggcgatatctacgctaaggcacgggaactgcactttgccaccgatgtttcccgcgtggtgttcatcgtgcgggtgatcagcggcggcgatatctctgcctacgatgtggtcagcagcctgttccccgataagcagaaggactttgtgttcaatatcagcgagaccgacaccgtgctggtcaaggaaatccgcaagggcatcgaccgcaccgatatggaaaagctggctgccagcattgtggataccctctccggcgagcactacatcaaggccgtggtaggcattggcacccccattgccaacgtgaaggatctggctacctcctttaaggaagctcagatcgccatggaagtgagcaaggtgttcgataccgaaaagcagatcatccgctacgataacctgggcattgctcgtctgatctaccagctgcctaccaccgtgtgcgagatgttcctgcgcgaggtgttcaagcagggcagcattgaaagtctggatcaggagaccctgttcaccatccagcgcttctttgagaacaacctgaatgtgtccgagaccagccgcggcctgtttgtgcaccgcaacacgctggtgtatcgtctggaaaagatcaaaaagctgaccggtctggatctgcgtgagttcgacgacgctatcgtctttaaggtagcgctgatggtaaagaagtacctgtccaacaacccggccaaatactga

SEQ ID NO: 2938 - DNA, 1464 bp, Faecalibacterium prausnitzii 1 (SL3/3 - M21/2)
atggagtgtaaaatggtacatcagtatcaattgaacggttataacatcgtgctggacacctgcagcggctcggtgcacgttgtggacgaggtggcctacgatgtcatcgccatgtacccggagcataccgcagacgagatcgttgccgccatgctggcaaaatacggcagccgcccggacgtgaccgaggaggatctgcgccagtgcatcgacgacgtgaccagcctgaaggaaaacggcaagctgtggagcccggatgtctataaggacatggcctttgacttcaagaaccgcaacaccgtggtaaaggcgctgtgcctgcacgttgcccatagctgcaacctgagctgctcttactgctttgcctcgcagggacgctaccatggcgaccgcgccctgatgagctttgaggtgggcaagcgcgccatggacttcctcatcgagaacagcggcacccgccgcaatctggaagtggacttctttggcggcgagccgctgatgaactttgatatggtcaaaaagctggtggcctactgccgcgagcaggagaagatccataacaagaacttccgctttaccatgaccaccaacggtgtgctcattgatgacgacgttatcgacttctgcaacaaggagtgccacaatgtggtgctgagtctggatggccgcaaggaggtcaacgaccgcttccgcgtggactgtgcaggcaacggcagctacgaccgcatcgtgcccaagttccaggagttcgtcaagaagcgcggcgacaagaactactatatgcgcggcacctatacccactttaacaccgactttaccaacgatatcttccacatggcagacctcggctttaccgagctgagcatggagccggtggtctgcgaccccagcgaccccagcgccctgactgaggccgacctgcccatcctgaaggagcagtacgagatccttgccaaggagatgatcaagcgcgaccgcgagggcagaggctttaccttctaccactacatgatcgacctgaccggcggtccctgcatctataagcgcatctccggctgcggctccggcaccgagtacatggctgttaccccctggggcgatctgtacccctgccaccagttcgtgggcgaccccaagtacctgctgggcgatatctggaagggcgttaccaacaccgccgtgcgggatgagttcaagcactgcaacgcctatgcccgcaaggagtgtcaggactgctgggcaaagctgtactgctccggcggctgcgctgccaactcctaccatgccaccggcagcattaccggcgtgtacgagtacggctgcgagctgttcaaaaagcgcatggagtgcgctatcatgatcaaggtagccgagaatcaggaactggcagccaagggcatcgaggtgcctattgagctgggttctacctgcaacgcctgcgctgacggcgaagcctgcgaatga

SEQ ID NO: 2939 - DNA, 1332 bp, Faecalibacterium prausnitzii 1 (SL3/3 - M21/2)
gtggaggaaaaacaaatgaatctcatcaagtgtgaaaagctcgagaagagcatggcagaactgcagttctccatcgatgcagaggccttcaagaaggctgttgccgatgttttcaaaaaagagggcaagaagtaccctgtgcagggcttccgcaagggcaaggctcccaaggctctgatcgagaagatgtacggcgcagacgtctttacctacgacgccatcaacgagctgttcccggaggcttttgaggctgccgctaaggaagccggtgtggagcccgtgggccgtcctgaggtcagcgtggattctgccagcgaggcagagggcgctaccctgaccgtgaaggtcgccgtgaagcccgaggtcaaggttggcagctacaatggtctgaccgtggaaaagactgtccatactgttaccgacgaggctgtggacgctgagctgaagcgtgtgcaggagcgcaacgcccgtgagctgacccgtgagggcgctgctcagaatggcgatatcgctgatatcgacttcgagggctttgtggacggtgttgcattcgagggcggcaaggctgaacactacaacctgactctgggcagcggcagcttcatccccggcttcgaggagcaggtcgttggtcactctgccggcgaggagttcgacgtgaacgtcaccttccccaccgagtatcaggctgctgagctggctggcaaggctgctgtcttcaagatcaagctgcatgaggtcaagtacaaggagctgcccgctctggatgacgagctggcaaaggactgctccgagtacgacactctggacgagttcaaggcttccatccgcaagaacaaccaggagcagctggacaagcaggacgatctggctgtcgagaatgctctggtcgatcaggtcatcgagagcatggagggcgagatccctcaggctatgtacgatgtccgcatggacgagatggtcaacgactttgctttccgtgtggagcagcagggtctgcgtctggaggactacctgaagtatatgggtcagtccatggagcagttccgcgccgctttcatgccgcaggctgagaagcaggtcaagatcggtctggctctggaggctgttgctgctgctgagcacatcgaggcttccgaggacgagatcaatgccgagatcaagcgcattgctgaccagtacaagatggaagaggacaaggtgcgtgagctgatcaacctcgaggatctgaagcaggatctggctcgcaccaaggccatcgacttcatcaagagccacgccaatatcgtggagaagcccgcagaggctgagaaggctgctgacgctgagtaa

SEQ ID NO: 2940 - DNA, 1695 bp, Faecalibacterium prausnitzii 1 (SL3/3 - M21/2)
atgatttctggtaagatcctgcgcgacgccatcatttccggcgccaacaacatcaacaaccagcgttcccgcgtggacgagctgaacgttttccccgtgccggatggcgacaccggcaccaacatgggcatgaccgtgggctctgccgtgcgtgagctggaggctctggacgacagctgcaccgtgggcgaagctgccaagactgccgcttctgccatgctgcgcggtgcgcgcggcaactccggcgttatcaccagcctgctgttccgcggcttctccaaggctttggagggcaaaaaagaggctgacgttgccgatatcgtggctgccctgcagaagggtgttgagggcgcttacaaggccgtgatgaagcccaccgagggcaccattctgaccgttgcccgcgttgcttccgaggaagctgctgccagtgatgccgccgatgtgcccgccctgtgggacgtggtgctgactgccggccagaaggcactggacgatacccccaacctgctgcccgtgctgaagaaggccggtgttgtggacgcaggcggtcagggcatcatggtcatctttgagggcatgggcaaggtgttccacggcgagggcattattgccggtggtgaggctgcccccaacaaggcaaagctgtccactgaaaatgccggtaagggcgtgtttactgacgacctgatgaaggtggaggacattaccaacggctactgcacccagttcctcatcaataagtacgagggtgccagcgccgccaagatgcgcgcctttgcagagtccaacggcgacagtgtggtctgcattgaggatgacgatgttatcaacctgcacgttcacaccgccgaccccggcaagatcctgagcgaggccatcaagtacggctacctgaccaacttcaagatcgagaatatgcacgagcagttcctcgcccgccagaagcagggtaagagccttgaaaagcaggcttctgccgagaaggctccctctcaggccagcgagttcatctatgctgccgtggaccccagccgtgactacggctttgtggccgttgccgccggtgagggtctgaaggctgtgttcaccgatctggcagcagacgctgtggtgtccggcggccagaccatgaacccctccaccgaggacattctggcagccatccagagtgtgcccgccaagaccgtgttcgtgctgcccaacaacaagaacatcattatggctgccgagcaggcacagaagctggcggaccgtcaggtggtggtgctgcccacccgcaccgtgcccatgggcattaccgcactgctgaactttgacccctctgtgaatgccgagaccaacaccatcaacatgatggctgctgccgacaaggtatccaccggtctgattacctacgccgcccgcgacagcgagtacgacggcaagcgcatccgcaagggcgagatcatggcactggagaacggcaagatcgtttccacctccaccgatatcaccaaggccacctaccgtctggcacgcaatatgtgcaagaaggattccagctttgtcaccatcatctctggctgtgacgtgagcgacgaggacgccgaaaaggttaccgagatcgtaaaggcaaagtgccccaaccatgtggaagtaagccacatccgcggcggccagcccgtttactactatatgatcagcgtggagtaa

SEQ ID NO: 2941 - DNA, 1401 bp, Faecalibacterium prausnitzii 1 (SL3/3 - M21/2)
atgccgaacgaacgacgttattccaatgaactgaatctggagagcgtgggcatcaatctgccctacaatatgcaggcagagcagagcgtgctgggcgcggtgctgctcaagcccgacaccctgaccgatcttgtggagatcctcaagccggaaatgttctacacccggcagaacgcccagatctggaccgagatgctgcgcctgttcaccaacgaccagaccatcgattttgtcaccctgctggatgcagtggtgtccgatggtgtgttccccagcgcagacgaggccaagatctacctgaccggtctggcagaaacggtgcccagtatctccaacgtaaaggcttatgcccagatcgtgcaggaaaaatatctggtgcgccagctgatgggggtagccaaggacattttgcaggacgccggggacgagccggacgccgaccttctgctggaaaatgccgagcagcgcatctacgagatccgctccggccgcgattccagcaccctgaccccgctttcgtccagcatggtggaaacgctgaccaacctgcaaaagatcagcggcccggatgcggataagtacaagggcatccccaccggtttccgcctgctggacaccgtgcttaccggccttggccgcggtgatctggtcattctggcagcccgtcccggtatgggcaagaccagttttgcactgaacatcgccacccgcgtggccatgcagcaaaaggtgccggtggccatcttcagtctggaaatgaccaaggagcagctgaccaaccgtatcctctcgtcggaggccggtatcgacagtcaggccttccgtaccggtgcgctgcgcgccgaggactgggagtatctggcgctggcaactgaaaaactgcacgatgcaccgatctatatggacgatacctccggtatcaccatcaccgagatgaaggccaagatccgccgggtgaatcaggaccctgcccgccccaacgtgggcctgatcgtcatcgactatctgcagctgatgaccaccggccagcgcagcgagaaccgtgtgcaggagatcagctccatcacccgaaacctgaagatcatggctaaggagctgaacgtgcccatcatcgcgctgagccagctgtcccgtgcagtggaaaagcagggcaacaactccagccaccgcccgcagctttcggacctgcgcgactccggttccatcgagcaggacgcagactgcgttctgttcttgtaccgcgactcctactacgccagccagaacccggatggcgccgaggtggatgccgataccgccgagtgcatcgtggcaaagaaccgtcacggcgagaccagcaccgtgccgctgggctgggatggtgcccacacccgctttatggatgtggacttcaaacgctga

SEQ ID NO: 2942 - DNA, 810 bp, Faecalibacterium prausnitzii 1 (SL3/3 - M21/2)
atgtctgtaaaaaagcaaggtttttcgtcaggtttgtgtcttgtgcacagcggcatttttcagtacaataaaaaggcagagaagaaaaataagcgctgcgaccggaacgggttgccgcgctgttttgtattttgcggcgcagctgcgcccggtgaaaaaaaggagtgctgtacaatgatcaacatggtcaagcttcccaccagcaaaagtgaactgttcctgcgggtggccaagggacattttgccaccagccacagccacatcaactattacatcgacgtgaccacccaaaagacccgcctttccgaggcaaaagccgtggcaaaggagctggtcagcgcttaccagcacagcaccatcgtggataccgtgctctgcttggacggcacacaggtcattggcacctgccttgccaacgagctgaccaaggacggctttaccaatatgaatgcccacaagaccatctacatcgtcaccccggaatacacctccggcagccagatcattctgcgggacaatcttgcccccatggtcaagggcaagcacgtcctcattctggccgcatccatcaccaccggctacaccattcaggcagctgtggaagccgtaaactactacggcggcatcgtggccgggctttcggctatttttgccaccactcacgagtgcctcggctacccggtcacctccatcttcgaccccaccagcctgccggattacgccagcttcgactcccgcgactgccccctgtgcaaggccgggcagcacattgacgcgctggtgaacagcttcggctactcggcgctgtaa

SEQ ID NO: 2943 - DNA, 1407 bp, Faecalibacterium prausnitzii 1 (SL3/3 - M21/2)
ccgctgccaaaaagtaacctgaatatgcttaaaaagggccggtcagcactgaccggctcttttcagatacacccaaggaggtttatttttatgatcgcatccgaagtccgtgaaatgctgtccttcatcgacggcaaccccaccgcataccacaccaccgccgctgtgcgggatatcctgttgaaggcaggctttgccgagctgctggaaagccgcaagtgggcgctggaacccggcaaggactactttgtctgccgcaacggttccagcatcatcgccttccgcatgggcgaccagctggaaaattacagcttcaacgttgccgccgcccatacggattctccctgcttccgcatcaaggagaacgccgagatccacatggggcagaactacaccaagctgaacaccgagggctacggcggcatgatctgcgccacatggatggatcgtccgctgtctgtggcgggtcgtgtgctggtgcaggagaacggcgctatcgtatcccgtctggtggcactggaccgcgacctgttgatgatccccagcgttgccatccacatgaaccgcgaggtcaacgataaggcttccttcaacaagcaggtggatatgctgcctgtgctgggcggcgcctgcgaggagggcgcgctgaaaaagctgatcgcagaggagctgaaggtgtccgaggagcagatccttggcagcgacctgttcctctatgtgcgggaaaaggccaccgtctggggctgcaacgaggagttcatctcctgcggccgtctggacgaccagcagtgcgtttacggcatcctgaaaggtctgctgaccgccaagaacgcccgctccatcggcgtggcggccttctttgataacgaggaagtcggctccggcaccaagcagggcgcagcttccaccttcctgtacgatgtgctgcaccgcattgcccagagccttggcggcaacgacgaggacttccaccgtgcggtggcttccagctttatggtcagcgccgacaacgcccacgccgtgcaccccaaccacccggagcacaccgatgtgaacaactgcacctacatgaacaagggcgtggtcatcaagacccacgcaggtcagaagtacaccagcgacggcatgagcgttgccgctgcccgggagctggctgcccgcgccggtgtgccgctgcagtactttgcaaaccgctccgataaggtgggcggcagcacgctgggcaatctggcgatggcacaggtgtccatgaactgcgtggacatcggcctgccccagctggcgatgcactcctgctacgagaccgccggcgcagaggataccctctcgctcatcaagctgatgcaggagctgtacagcagccactttgaagagactgcattcggtaccctttccatcagcaagtaa

SEQ ID NO: 2944 - DNA, 1455 bp, Faecalibacterium prausnitzii 1 (SL3/3 - M21/2)
agcccgcgccttgttgcgcagcggcctgcacattgcccgcagaaggaagagcggcagctgataacgccatttttattgtattttaccccttttaagaaaggaggagaccccatgagcaaaccgatcgtagcagtggtgggccgccccaacgtgggcaaatccaccctgttcaataagctgtgcggccagcgccttgccattgtggaggataccccgggcattacccgcgaccgcatttttgccaactgcgagtggaacggccacgagtttttgctggtggataccggcggcatcgagcccaaggccaccgagggcattctggcccacatgcgcgagcaggcgcagatcgccattgacaccgccgactgcatcatcatggtcacggacgtgcgcaacggcctgaccgcagccgacgaggatgtggcacatatgctgcgccgcagccataagcccatcattcttgccgtgaacaagtgcgacaaggtgggcgaggctcccatggaactgtacgagttctacaacctcggctttgacgaggtgatgcccatttcttccgtgcatggtcacggtacgggcgatctgctggatgccgtgtgcgcccatctggacttcagcgagaccgtggtggaggaggaccgtatccccgttgccatcatcggccgtcccaacgtgggcaagtccagcctgaccaaccgcattctgggcgagaaccgcatgatcgtggccaacgaggccggcaccacccgtgatgccatcgacaccccggtggacaacgcctacggcaagttcatctttaccgataccgccggtctgcgcaagcgcagcaacatcagcgatggtctggagcgctacatggtggtgcgtgcactggctgctgtggagcgcagccgcgtggcgctgatccttgtggatgccactgttggctttaccgagcaggacagcaaggtggctggctacgcccacgagcagggcaaggcctgcatcatcgtggtaaacaagtgggatgccgtggaaggcaaggagaccaacaccatggagctgcagcgccggggctatgccgagtgcttcagctttatgggctatgcacccattatcttcatctctgcccagactggctacaacgtgaacaaactgatgcagctgatccgggatgtggatgccgagaacggtgcccgcgtgcccaccggcgtgctgaacgagatgctggcccgcgcgaccgcccggatgcagccccccagcgacaagggccgccgcctgaagatctactacctgacgcaggcctccacccgtccccccacgttcgtggccttcgtgaacgcaaagcacctgttccacttcagctatcagcggtatctcatcaatcagatccgcgaaaactttggtctggagcatacgcccatccgtctggtcgtgcgggagcgcggctccggcgaggtgggtgccaaggacgtataa

SEQ ID NO: 2945 - DNA, 1635 bp, Faecalibacterium prausnitzii 1 (SL3/3 - M21/2)
atggcaaagcagatcaagcagggcgaggacgcccgcaaggcactgtgtgccggtattgataccctggctaacaccgttaagattaccctcggccccaagggccgcaacgtggtgctgggcaaaaagttcggcgcaccggtcatcaccaacgatggcgtgaccattgcaaaagagatcgagctgaaggatgagttcgagaacatgggcgcacagttggtgcgtgaagtcgcaaccaagaccaacgatgccgcaggcgatggcaccaccactgctaccgtgctggcacaggccatggtcaacgagggcatgaagaacgttaccgccggcgcaaatcccatggatatccgccgcggcatgagcaaggccgttaccaccgctgtggagaccatcaaggcacacagccagaaggtgaaggacagcaacgatatcgcccgcgtcggcaccatctctgccggcgaccccgagatcggccgtctgattgccgaggctatggagaaggtcacctctgacggcgttatcaccatcgaggagaacaagaccaccgcagagacctacaacgagatcgtggaaggtatgcagtttgaccgcggctatctgactccctatatggtcaccgataccgacaagatggtggccgatctggacaacgctgctatcctgatcaccgataagaagatcagcgtcattcaggatctggttcccctgctggagcaggtgatgcagaacggcatgaagctgctgatcgtggctgaggatatcgagggcgaggctctgtccaccctgatcgtcaaccgtctgcgcggcactctgaatgtcgtagctgtcaaggctcccggctttggcgaccgccgcaaggagatgctgcaggatatcgctaccctgaccggcggcaccgtgatctcttctgatctgggctatgagctgaaggacgcaaccgtccagatgctgggtcatgcccgtcaggtgaaggtgaccaaggagaacaccaccatcgtgggcggcgcaggcgataaggacgccattgcagcccgcattgcccagatccgcagccagatcgaggccgctaccagcgactttgaccgcgagaagctgcaggagcgtctggctaagttggccggcggcgtggctgtcatcaaggtcggtgctgctaccgaagtcgagatgaaggacaagaagctgcgcattgaggatgcactgaacgctaccaaggcagctgtgcaggagggtgttgtagccggcggcggtaccgctcctatcaatgcgatccccgctgtgcgcgccctgtgcgacacgctggagggcgacgagcgcaccggtgccaagatcgtgctgaaggctctggaggctcctctgcgccagatcgccaagaacgccggtctggagggcagcgtcatcatcgacaagatcatctctgctaacaagcccaactacggcttcgatgcccagaacgaggtctttgtcgaggatatgatcgctgcaggcatcgtggacccgaccaaggtcacccgttccgctctggagaacgcagcttccgtcgctgagatggtgctgaccaccgagagccttgttgctgacctgccggaacccccggctcccgccgcacctgccggcggtgacatgggcggcatgtactaa

SEQ ID NO: 2946 - DNA, 1398 bp, Faecalibacterium prausnitzii 1 (SL3/3 - M21/2)
atgattaaagcaatgcaatgttggatacaacaagcctgtaaaaaacgactgtccccgcaggggaaacacaaggaggaacccatggcacttcatgttctggacgaagccaaccgctgcctcggctgcaaaaagccgatgtgtcaggagggctgccccatccacaccaatatcccggaagtcatccgtctgctcaaggcaaaccagatggacgatgcaggccggatgctgtttgaaaacaaccccctgaccactgtatgcagtctggtgtgcaaccacgaaaagcagtgcgagggtcactgcatccgcaaccggatgcccagccacgacccggtgcacttttccatcatcgaggactatatctccaccacctacgccaacaagatgaccgcaggccctgccccgaaaaacggcatgaaggccgctgtggtgggctccggcccggcaggcctgaccatcgcagtgctgctggcacgctggggctacgatgtgaccatctttgacgcccgggataagatcggcggcgtgatgcgctacggcatccccaactaccgcctgccggacagtgtgctggacgatttccagtatcgtcatctggaactgaagggcatcaaggtgcgccccaataccaccatcggcaagaccatcaccatcgacgatttgttccgcgacggctataagagcgtgttcatcggcgccggtttgtggaaagccaacgccatgcacatcaagggcgagagccttggcaacgtagcctttggcatcgactatctggcaaactccaaggccttccgtctgggcgatgacgtggccgtcatcggcgtgggcaactccgctatggactgcgcccgcactgccatccgcaacggtgcccgccacgttacctgctacgcccgccgggacgaaagctgcatcagcgcttccgagtacgaggtgagctacgccaagctggagggcgtgggcttccgtttctgcaaggcaccggtggagatccgggaaaacggcctgatctgccgcgacaccgttaagggcgaggacggcaagtttacgcaggtagagggcagcgagactttttacccccacaccggcgtcatcgtgtcggtcagtcagggttctgagagcaacctcgtcaagaccacgaccggcatcgagaccaaccagaagggtctgctgagcgtcagcgaggacggccgcaccacccgcgagggcgtatttgccggcggcgacgccgtcatgggcgcccgcaccgtggtggaggctgtggctgttgccaaaaaggtggctggcgccatggacgagtatatgaagagcctgcccgccgacaccgctgccgacccctatgccgatatcccggtgttccagacccctacctctgacgtgctggcaaaacagcagttgtaa

SEQ ID NO: 2947 - DNA, 999 bp, Faecalibacterium prausnitzii 1 (SL3/3 - M21/2)
ataagggagagcattatgaaactgggcattcttggcacgggtaagatcgtgcaggaatttttgccatggcttgtggagcacacgccgtttactgtgcaggcggtgtgcagcaccccgcgctcggcggcaaaagccgcagagctgtgtgcacaatatcagatcccgcagcacactaccaattattttgagcttttgcagtgggtggacgcggtctacatcgccgtgcccaacttacagcacgcccgctacgcccgggtggcgctggaggcaggcaagcacgtcattgtggaaaagcccatggcggtgaccgccgccgagaccgaggagctggctgcgctggcacagcgcaagcggctgttcctctttgaggcgatgaccacccagtaccagcccaactacgccaaactccgggagctgctgccccgggtgggcacggtgcgcatggtacagtgcagcttcagccagtattccagccggtacgacgccttttgcgccgggcagaccccgccggtgttcgacccgctgtgcgcgggcggtgcactgatggatttgggcgtgtacaacgtcagctacatcgtaggtctgttcggtgagcccaacaaggcagtatacgccgccaacatggagcgcaatatcgacaccagcggtgtgctgatgatggattacagcggtttcaaggcggtaagccttgccgccaaggactgcgcagcccctgcccgctgcatcattcagggcacgaagggctacattctgcaaaaatccaccccgaactactgcggcggtgtgaccttccatcccaacgagggcaaggaggagcactacaacctgaacggggatcgtccccggcaggcggcagagttcgaggccttttaccgcgccatgaccgccggagaccaggagctgtgcgcccgcatgctggataccagcatcgcggtgagccgggtgctcacggtagcgcgccgcagcgccggggtacgcttccccggcgacagattctga

SEQ ID NO: 2948 - DNA, 1137 bp, Faecalibacterium prausnitzii 1 (SL3/3 - M21/2)
atggtcatagtagtgcgcggctgcggggcaacggcccggcgcagcgcaaatccaccggcaggggcttgccccttgcccggtgcagacacggaggatacgaacgtgaaaaagtttagtattggtgttctgggtgcaggcacctggggcatggctctggcacggatgctgaccgtcagcggcaacgatgtacaggtgtggtcggccattgaggccgaggtggataacctttccaccacccgggtgcaccctaatctgccggggatggtcatcccgcaggagctgcgttttaccaaaagcatagaggaagtgtgcaccggcaaggatgtgctgctgtttgcagtgccgtcggtgttcgtgcgtgccacggcggccaaggcgcggccctatatccgctccggccagatcatcgtggatgtggcaaagggcattgagcccgataccttatataccatgaccgagatccttgccgatgagctgagccacgagaacggcccccgggcggtgcgtctggtggcgctcagcggccccacccacgccgaggaggtggcgctggatctgcccaccaccatcgtttccgccagcccggatctggaggctgccgaggtggtgcaggaggtgttcagcaacacctgtatgcgcgtgtacaccaacactgatatcaagggcgtggaactgagcggtgctatgaagaacgttatcgcgctgggtgtcggcatctccaccggccttggctacggcgataacgcccgcgccgccctgatcacccgcggcattgccgagattgcccggctgggtgtggctatgggctgcaatgtccagacctttgcgggtctggccggcatcggcgatctgatcgttaccgccaccagtatgcacagccgcaacaaccgcgccggtatcctgatcggcaagggtgaaagcccggagcaggctgtgaaggaggtcggcatggtagtggagggcatcaacgccctgcccgccgccatggaactggccgagaagtaccatgtggaaatgcccattgcccagacggtgaacgccatcgtcaaggagggcatgagcgccagcgacgcgctgcgcaacctgatgtcccgcgaccgcaagagcgagatgccgcagggctatgagagcgtgtga

SEQ ID NO: 2949 - DNA, 3573 bp, Faecalibacterium prausnitzii 1 (SL3/3 - M21/2)
atggaaaacaacgttttcgattccattaaaatcggccttgcctccccggagcagatccgcgcttggagctacggcgaggtcaaaaagcccgaaaccatcaactaccgcaccctgaagccggagcgtgacggcctgtactgcgagcgcatttttggacctaccaaggactgggagtgccactgcggtaagtacaagcgcatccgttacaagggcaaggtgtgtgatcgctgcggcgtcgaggtcaccaaggccaaggtccgccgtgagcgtatgggtcacatcgagctggccgctcctgtgagccacatctggtacttcaagggcatccccagccgcatcggcctgatgctggacatcagcccccgcctgctggaaaaggtgctgtactttgcaagctatatcgtcaccgatcccggtctgaccccgctggataaaaagcagctgctgaccgagaaggaataccgcgaaatgtgcgagcgctacggcgacgagttcgaggctgccatgggcgccgaggctgtccagaccctgctgaaggagatcgatctggatcagctgagcgctgagctgaccgccgaggtggagaagtcctccggccagaagcgcgtgcgcatcctcaagcgtctggaggtcgtggaggctttccgcatctccggtaaccgccccgagtggatggtcatggacgtgctgcccgtgctgccgcctgacctgcgccccatggttcagctggacggcggccgcttcgccacctccgacctgaacgatctgtaccgccgcgtcatcaaccgcaacaaccgtctgcgccgcctgctggagctgggcgctcccgacatcatcgtgcgcaacgagaagcggatgctgcaggaggctgtggacagcctgatcgacaacggccgccgcggccgtccggtcaccggccccaacaaccgtgcactgaagagcctttccgatctgctgaagggcaagcagggccgtttccgtcagaacctgctgggcaagcgtgttgactactccggccgttccgttatcgtcgtcggccctgagctgaagatggatcagtgcggtctgcccaaggagatggctctggagctgttcaagccctttgtcatgaaggatctagtggagaagggcattgccaacaacatcaagtccgcccgcaagatggtcgagcgtgcaaagcccgaagtctgggacagcctcgagaccgttatcaagggtcaccccgtgctgctgaaccgtgcacctaccctgcaccgtctgggcattcaggccttcaaccccgtgctggtggaaggccgtgccgtcaagctgcacccgctggcctgtaccgcattcaacgccgacttcgacggcgaccagatggcagtccatctgcctctgagtgaggatgcctgccgtgaagccaagatgctgatgctggcttccggcaacctgctgaaaccctctgacggcgcacctgttaccgtgcctacgcaggatatgattctgggcagctactacctgaccaccgtccgcgagaacgacgagggcgcaggcaaggtgttccgtgatgagaacgaggttctgatggcttacgccgagcacgtcatcaccctgcacgcgcccatcaaggtgcgccgcaccatgaccattgacggcgtggagcgcaccggtctggtggatgccaccgccggccgcatcatcttcaacaatcccattccccagaacctgggctatgtggatcgtaccgatcccgagcactggctggagtacgaggtcagcttccgcgtgaccaaaaagaccctgcccgagatcatctcccgctgcatgacccgcaacggcacccgcaagtgtgctaagatgctggatgccatcaaggcacagggctataagtactccaccctgtccgctatctccgtggctgtgtgcgacgctgtgatcccgccccagaagcaggagctgatcgccgaggccgataaggagatcgccaaggtcggcaagctgttcaaccgtggtctgatctcggataacgagcgttacaacaagaccatcgatatctggcagaagaccaccgataaggtctccaaggctctggcagacaacctgcccaaggacaacgagatctatatgatggcagactccggtgctcgtggttctatgaaccagatcaagcagctggctggtatgcgcggcctgctggcaaacaccgccggtcacaccatcgagatgcccattcgtgcaaactaccgcgaaggtctgaacattctggaatatttcgtttctgcccgtggtgctcgtaagggtctggctgataccgctctgcgtactgccgactccggttacctgacccgccgcatggtcgatgtttctcaggacgtcatcgtccgcgagatcgactgcggcaccacagatggcctgtgggtctctgagatccacgagggcaaggagaagatcgagagcttccgcgagcgtctgatcggccgttttgccgtgggcgatgtggtcaatcccatcaccggcaaggtcatcgtgcccgagggcaagatgatcgacctgtacgatgccaacgagatcgaggcagccggtatcacccgtctgaaaatccgcagcctgctgacctgccgtgcaaagaccggcgtctgcgcacgctgctacggttccgatatggccaacggcgagccggtccgtctgggcgagtctgtcggtgttatcgccgcagagtccatcggcgagcccggtactcagctgaccatgcgtactttccataccggcggtatcgcatctgccgaggatattacacagggtctgccccgtgttgaggagctgttcgagagccgccgtcccaagagcatggccatcatgagcgagatctccggtgtggtctctcaggacgacaccaagaagaacgtggtcatcaaggtcaccggcaaggacgagaacggtgcagaggaagtcaagagctactccatcccgttcacccagcattcccgcgtgatgcccggcgaccgtgtggagaagggcgacatcatcacccgcgagggcgtgctgtacccgcaggatattctggccatcaagggtctggaggacgtgcagaactacctgatcaacgaggtccagaaggtctaccgtctgcagggcgttgagatcaacgataagcatatcgaagtcatcgtccgtcagatgtgccgcaaggtgcgcgtgaccgactccggctcctccaacctgatcggcggtgctctggcaagccgtctggaggtggagaacatcaatgccgatctgcagaagcgcattgatgcaggcgaagagggtctgaagctggtggagtaccagcaggtgctgctgggcatcaccaaggctgctctggccaacgactccttcctgtccgctgcatccttccaggagaccacccgcgtgttgaccgaggccgccatcaagggtaaggtcgacccgctgtccggtctgaaggagaacgtcatcatcggtaagctgatccccgccggtaccggtctgccggaggtgcgtgaggatctgaagaaccgtgaggctgagcgcgatgccgagatcgcagccgagctggctgcctccgcacagtaa

SEQ ID NO: 2950 - DNA, 609 bp, Faecalibacterium prausnitzii 1 (SL3/3 - M21/2)
gcagcagcaccgccgcaagacagactgccccgaattttttcaacatactcccgctccctgttccatatactgtactacaacgccgcacagcgcagcgcaaaagctttaaccagtagtataccatattctgcgcggcagtgcgagaggaaattgcgtgaaaatttatccaatgatttctgtgcgaaaaagcatcttgacgaactgcgcaaaacacgctacactataagcagaccaagcgggacgcagcccgctgcatcaactgctttttgtgataaagcaatacaggagcgtattatgtctgacgagatcaagaaccccaatactgaggaagaatatcagcccgacctgatgacccttgaggatgaggacggcaacgaggtcacttttgaggtgatcgatgcgctggaccacaagggcgtgcattatctggctgttgtggaatacgccgagaacgaagaggacctgaacgaggacgcccagctggtgatcctgagtgtcggggaggacgacgaaggcgaatatctggacgttgtggaggacgacgaggtgctgatggaagtcagcaagctgttcgaacagcgtctgagcgaggactacgatatcgagtaa
